United States Patent Application Publication US 2011/0105347 A1 - sequence listing, part 2

SEQ ID NO: 4697 - DNA, 1413 bp, Zea mays
  misc_feature (590)..(593): n is a, c, g, or t
  misc_feature (617)..(618): n is a, c, g, or t
  misc_feature (658)..(658): n is a, c, g, or t
  misc_feature (668)..(668): n is a, c, g, or t
  misc_feature (670)..(670): n is a, c, g, or t
  misc_feature (714)..(714): n is a, c, g, or t
  misc_feature (716)..(716): n is a, c, g, or t
  misc_feature (728)..(731): n is a, c, g, or t
  misc_feature (734)..(734): n is a, c, g, or t
  misc_feature (737)..(738): n is a, c, g, or t
  misc_feature (740)..(740): n is a, c, g, or t
  misc_feature (742)..(746): n is a, c, g, or t
  misc_feature (748)..(750): n is a, c, g, or t
  misc_feature (757)..(767): n is a, c, g, or t
  misc_feature (773)..(780): n is a, c, g, or t
  misc_feature (788)..(788): n is a, c, g, or t
  misc_feature (790)..(801): n is a, c, g, or t
  misc_feature (806)..(816): n is a, c, g, or t
  misc_feature (820)..(820): n is a, c, g, or t
  misc_feature (826)..(831): n is a, c, g, or t
  misc_feature (835)..(837): n is a, c, g, or t
  misc_feature (839)..(839): n is a, c, g, or t
  misc_feature (843)..(850): n is a, c, g, or t
  misc_feature (852)..(853): n is a, c, g, or t
  misc_feature (856)..(858): n is a, c, g, or t
  misc_feature (864)..(883): n is a, c, g, or t
  misc_feature (891)..(892): n is a, c, g, or t
  misc_feature (897)..(900): n is a, c, g, or t
  misc_feature (907)..(907): n is a, c, g, or t
  misc_feature (910)..(911): n is a, c, g, or t
  misc_feature (920)..(926): n is a, c, g, or t
  misc_feature (928)..(948): n is a, c, g, or t
  misc_feature (957)..(967): n is a, c, g, or t
  misc_feature (974)..(976): n is a, c, g, or t
  misc_feature (978)..(989): n is a, c, g, or t
  misc_feature (993)..(996): n is a, c, g, or t
  misc_feature (998)..(1004): n is a, c, g, or t
  misc_feature (1007)..(1013): n is a, c, g, or t
  misc_feature (1016)..(1019): n is a, c, g, or t
  misc_feature (1021)..(1021): n is a, c, g, or t
  misc_feature (1023)..(1038): n is a, c, g, or t
  misc_feature (1040)..(1052): n is a, c, g, or t
  misc_feature (1055)..(1058): n is a, c, g, or t
  misc_feature (1061)..(1070): n is a, c, g, or t
  misc_feature (1072)..(1074): n is a, c, g, or t
  misc_feature (1077)..(1078): n is a, c, g, or t
  misc_feature (1088)..(1098): n is a, c, g, or t
  misc_feature (1100)..(1101): n is a, c, g, or t
  misc_feature (1108)..(1124): n is a, c, g, or t
  misc_feature (1130)..(1130): n is a, c, g, or t
  misc_feature (1132)..(1135): n is a, c, g, or t
  misc_feature (1142)..(1168): n is a, c, g, or t
  misc_feature (1170)..(1170): n is a, c, g, or t
  misc_feature (1173)..(1176): n is a, c, g, or t
  misc_feature (1180)..(1183): n is a, c, g, or t
  misc_feature (1185)..(1185): n is a, c, g, or t
  misc_feature (1187)..(1187): n is a, c, g, or t
  misc_feature (1189)..(1194): n is a, c, g, or t
  misc_feature (1196)..(1201): n is a, c, g, or t
  misc_feature (1203)..(1210): n is a, c, g, or t
  misc_feature (1212)..(1227): n is a, c, g, or t
  misc_feature (1232)..(1234): n is a, c, g, or t
  misc_feature (1239)..(1246): n is a, c, g, or t
  misc_feature (1253)..(1254): n is a, c, g, or t
  misc_feature (1257)..(1257): n is a, c, g, or t
  misc_feature (1259)..(1285): n is a, c, g, or t
  misc_feature (1288)..(1296): n is a, c, g, or t
  misc_feature (1298)..(1300): n is a, c, g, or t
  misc_feature (1302)..(1302): n is a, c, g, or t
  misc_feature (1304)..(1309): n is a, c, g, or t
  misc_feature (1316)..(1316): n is a, c, g, or t
  misc_feature (1318)..(1318): n is a, c, g, or t
  misc_feature (1326)..(1332): n is a, c, g, or t
  misc_feature (1335)..(1336): n is a, c, g, or t
  misc_feature (1338)..(1342): n is a, c, g, or t
  misc_feature (1347)..(1347): n is a, c, g, or t
  misc_feature (1351)..(1356): n is a, c, g, or t
  misc_feature (1364)..(1366): n is a, c, g, or t
  misc_feature (1371)..(1381): n is a, c, g, or t
  misc_feature (1384)..(1409): n is a, c, g, or t
ttacgatgccacaggctgcaaggccggcgatgactccaccgccatcactgccgacgagcgaggcgaacgcgaagagggcgatcttgccgtaggtcggggcaaggttcaggttggtgaggcccattccgtaggagttgcagaacgcaaccacgggagcgaagaagtagcacaggaggacaaggtaccacttgagctggggaaatatggcgggcacactggcggtggatattgctgccaggacaatgtaaccagaagcagcaaaccaaggagatatactatctttgaggaatatctctgtttgtagtttctcatctgctagttgttcacaactcccgtcatctgcagatgagatgacgaaacatgcattggacaaatactatgggcatgtcagcttttcgtaagacggcatattagatgagctatatattgtgcaactaatgttcgcaactcacaagccacaaaattaatctcaaagcatgtggccaacgcattgcactacaactaagaagtaacatgtttaccttccatagcttgaacaggcagctcacgttgtttcgattgcatgctgcataatcaaaaagctctggaannnnaacgtgttacttcttagttgtagnncaatgcgttggccacatgctgtgaaattaattgtggcttntgagttgcgnanattagttgcacaatatatagctcatctaatatgccgtcttacgnanagctgacatgcnnnnatnatnntncnnnnntnnntttctcnnnnnnnnnnncatatnnnnnnnngtggggancnnnnnnnnnnnnaaaannnnnnnnnnnaagnatttcnnnnnncatnnnantttnnnnnnnntnngcnnntttcgnnnnnnnnnnnnnnnnnnnnaaatcccnncccgnnnngcccccnctnntttcccccnnnnnnncnnnnnnnnnnnnnnnnnnnnnccggtcttnnnnnnnnnnnttttttnnntnnnnnnnnnnnntggnnnngnnnnnnntgnnnnnnntcnnnnanannnnnnnnnnnnnnnngnnnnnnnnnnnnnacnnnnccnnnnnnnnnnannncannccccttctcnnnnnnnnnnntnnccatctnnnnnnnnnnnnnnnnncaattngnnnnggggggnnnnnnnnnnnnnnnnnnnnnnnnnnntnttnnnntttnnnncncntnnnnnntnnnnnntnnnnnnnntnnnnnnnnnnnnnnnnaaaannnaaaannnnnnnnaaaactnntcntnnnnnnnnnnnnnnnnnnnnnnnnnnnatnnnnnnnnntnnncncnnnnnnccctttncnttctcccnnnnnnnccnntnnnnntgtantccnnnnnntttttccnnntctcnnnnnnnnnnnacnnnnnnnnnnnnnnnnnnnnnnnnnntttt

SEQ ID NO: 4698 - DNA, 364 bp, Zea mays
gctcgagcggcacgagaggctcagccagtgggcgatgtacatggacgcgtcagggttccgccgcgtcccgctcagcttccgcgccattagggagagtgagctcaagctcgcgagcttcgggatgagtgcatgccgctaccaggtggaaagcgacggccttctgctggggtggggctccacgcgtctctactctgtatcggcgtggaggccaaacaagtctgggatcagagagtgtacgtttaggagttgatatgatctggcgctgtatctgagttacttaattcataacacgcatcagttttaaattgctatctggaaagaatcaggttgttgttgcccttcctatctgagaggtttctcagag

SEQ ID NO: 4699 - DNA, 638 bp, Zea mays
tacctcttcggtacacaggccacactgccatgccatcccttcccttcccagctgtgctcgatggagcattatattccaattaatgacgtaatgtaatgtacgcgtacgtacgtggccgttggttttgcttttgcagcagctgatgagaagcgtgcatcgctagactgggaggcaaggtaccgcatcctctacgggacagcgcggggcctgctgtacctccacgaggactcgcaggtcaggatcgtgcaccgcgacctcaaggccagcaacatcctgctcgacgccgacatgagccccaagatctccgacttcgggctggcgaggctcttcagcgccgacaacaccaccaccgtcacgagccaagttgtcggaacgctgtaagcgagcctgttaatgtaattaagctgtgttgccgagcagctccgctccgcgacctgatgaagaagacgcgcctgtttttttttcatgcctgcttggcagaggatacatggcgccggagtacgcggttctggggcacctgtcggtgaagcttgacgtttacagcttcggagtcctgatcctggaggtcgtaactggacggaggaacaccgacatgttcgagtcggcagccggagagtccatcatcctgctgagctaca

SEQ ID NO: 4700 - DNA, 880 bp, Zea mays
  misc_feature (53)..(58): n is a, c, g, or t
  misc_feature (810)..(813): n is a, c, g, or t
  misc_feature (816)..(817): n is a, c, g, or t
ggcgtgctaggtgggagggcggggcggaggagctggaggttcctggtagcggnnnnnnccggccatggagaagaggaagcggaccctggagctgcgggatcggctggaccggacgctggcgatgcccgacctcgcggaggaggcctcgctcagggcgctggtgaagaagcagatcctggcgtcgtccctgcccggctccgatcaaggtgcttgcttgctctctttacttcctctgctcagctcgcgtggttcatctatttcttggactgagtatgagcatattaatggcactgatgattgtaccgtttcttcttttcaatgatccgtttgagcctttatggtctgattagagaaggtaggggcgctagtgctacctgaaggccttgattgtggtagcgtatttgctggcctacatgtaaaaatggttgtctgctcagtgtttcttgactagtgcttttgcgtgtcctctttcaggtgacatcgatctcattgctgaaacgcgggcaaaagaagtctctgagtttcttgaaatgctagatacttcgagggacggacgatcttccaaggtccatgggctgccacagaaggagtggaaggtatgcatcaaactgaatttgttagctcattcatagtgacatcagctcgctgaaataattattctttttttagtttgtgatgctatcaccattttccagaatgcaacatttcacttgtgtttgtgatttctatatattattagattatatggtgcttcaaagttctctaacctgttcatgtccagtttttgggatcgattagtttctcttttannnnaanngttagtgcttatgaatggctgcagtgatccttagctacttttcgtggcagggaagcaagatca

SEQ ID NO: 4701 - DNA, 1378 bp, Zea mays
  misc_feature (568)..(576): n is a, c, g, or t
  misc_feature (578)..(578): n is a, c, g, or t
  misc_feature (580)..(584): n is a, c, g, or t
  misc_feature (586)..(586): n is a, c, g, or t
  misc_feature (591)..(596): n is a, c, g, or t
  misc_feature (598)..(617): n is a, c, g, or t
  misc_feature (620)..(634): n is a, c, g, or t
  misc_feature (636)..(636): n is a, c, g, or t
  misc_feature (647)..(655): n is a, c, g, or t
  misc_feature (659)..(673): n is a, c, g, or t
  misc_feature (676)..(677): n is a, c, g, or t
  misc_feature (679)..(679): n is a, c, g, or t
  misc_feature (681)..(686): n is a, c, g, or t
  misc_feature (692)..(693): n is a, c, g, or t
  misc_feature (695)..(729): n is a, c, g, or t
  misc_feature (731)..(736): n is a, c, g, or t
  misc_feature (739)..(745): n is a, c, g, or t
  misc_feature (749)..(750): n is a, c, g, or t
  misc_feature (752)..(758): n is a, c, g, or t
  misc_feature (762)..(765): n is a, c, g, or t
  misc_feature (768)..(772): n is a, c, g, or t
  misc_feature (779)..(783): n is a, c, g, or t
  misc_feature (786)..(792): n is a, c, g, or t
  misc_feature (794)..(795): n is a, c, g, or t
  misc_feature (799)..(804): n is a, c, g, or t
  misc_feature (809)..(809): n is a, c, g, or t
  misc_feature (816)..(828): n is a, c, g, or t
  misc_feature (830)..(833): n is a, c, g, or t
  misc_feature (835)..(841): n is a, c, g, or t
  misc_feature (843)..(861): n is a, c, g, or t
  misc_feature (863)..(871): n is a, c, g, or t
  misc_feature (874)..(881): n is a, c, g, or t
  misc_feature (883)..(885): n is a, c, g, or t
  misc_feature (888)..(893): n is a, c, g, or t
  misc_feature (896)..(896): n is a, c, g, or t
  misc_feature (898)..(899): n is a, c, g, or t
  misc_feature (904)..(916): n is a, c, g, or t
  misc_feature (918)..(925): n is a, c, g, or t
  misc_feature (932)..(937): n is a, c, g, or t
  misc_feature (940)..(950): n is a, c, g, or t
  misc_feature (952)..(954): n is a, c, g, or t
  misc_feature (964)..(970): n is a, c, g, or t
  misc_feature (976)..(976): n is a, c, g, or t
  misc_feature (978)..(986): n is a, c, g, or t
  misc_feature (989)..(994): n is a, c, g, or t
  misc_feature (1001)..(1001): n is a, c, g, or t
  misc_feature (1004)..(1006): n is a, c, g, or t
  misc_feature (1008)..(1010): n is a, c, g, or t
  misc_feature (1012)..(1016): n is a, c, g, or t
  misc_feature (1018)..(1030): n is a, c, g, or t
  misc_feature (1035)..(1042): n is a, c, g, or t
  misc_feature (1050)..(1055): n is a, c, g, or t
  misc_feature (1057)..(1057): n is a, c, g, or t
  misc_feature (1061)..(1064): n is a, c, g, or t
  misc_feature (1066)..(1070): n is a, c, g, or t
  misc_feature (1074)..(1078): n is a, c, g, or t
  misc_feature (1080)..(1085): n is a, c, g, or t
  misc_feature (1087)..(1089): n is a, c, g, or t
  misc_feature (1092)..(1109): n is a, c, g, or t
  misc_feature (1111)..(1127): n is a, c, g, or t
  misc_feature (1131)..(1134): n is a, c, g, or t
  misc_feature (1136)..(1141): n is a, c, g, or t
  misc_feature (1143)..(1143): n is a, c, g, or t
  misc_feature (1145)..(1153): n is a, c, g, or t
  misc_feature (1156)..(1158): n is a, c, g, or t
  misc_feature (1162)..(1167): n is a, c, g, or t
  misc_feature (1170)..(1170): n is a, c, g, or t
  misc_feature (1174)..(1178): n is a, c, g, or t
  misc_feature (1183)..(1185): n is a, c, g, or t
  misc_feature (1189)..(1194): n is a, c, g, or t
  misc_feature (1199)..(1204): n is a, c, g, or t
  misc_feature (1207)..(1211): n is a, c, g, or t
  misc_feature (1213)..(1216): n is a, c, g, or t
  misc_feature (1220)..(1227): n is a, c, g, or t
  misc_feature (1229)..(1237): n is a, c, g, or t
  misc_feature (1242)..(1268): n is a, c, g, or t
  misc_feature (1270)..(1298): n is a, c, g, or t
  misc_feature (1300)..(1302): n is a, c, g, or t
  misc_feature (1305)..(1322): n is a, c, g, or t
  misc_feature (1330)..(1331): n is a, c, g, or t
  misc_feature (1334)..(1343): n is a, c, g, or t
  misc_feature (1345)..(1345): n is a, c, g, or t
  misc_feature (1347)..(1350): n is a, c, g, or t
  misc_feature (1352)..(1352): n is a, c, g, or t
  misc_feature (1354)..(1356): n is a, c, g, or t
  misc_feature (1362)..(1367): n is a, c, g, or t
  misc_feature (1370)..(1375): n is a, c, g, or t
cggggagcttcatcggcagcatcgacgagaccgctgaggtgcttcagttctgcgtcgacaaggggctcacctcccagatcgaggtggtcaagatggggtacgtgaacgaggcgctggagcggctggagcgcaacgacgtccgctaccgcttcgtcgtcgacgtcgccggtagcaacgtcgaggcggaggcggcggcggcggatgcggccagcaactgatggcaccgcgtcgtcgagtcgaaccacgtctgtgcgccgcgtgcaacgttcgttcgggtcgagtctgcgtgcaacgttctgcttcctttactagttgttgtctttccgccttcttgccgttctgttctgggctttgagatgagacgatggatggtcagtttaaactatgggcatgacagcttttcgtaagacggcatattagatgagctatatattgtgcaactaatgttcgcaactcacaagccacaattaatctcaaagcatgtggccaacgcattgcactacaactaagaagtaacatgtttaccttccatagcttgaacaggcagctcacgttgtttcgattgctnnnnnnnnnanannnnncncaccnnnnnntnnnnnnnnnnnnnnnnnnnnctnnnnnnnnnnnnnnncncaccaattaannnnnnnnncctnnnnnnnnnnnnnnntannantnnnnnntcactnncnnnnnnnnnnnnnnnnnnnnnnnnnnnnnnnnnnnannnnnnacnnnnnnnaacnnannnnnnncaannnnaannnnnccagcannnnntannnnnnncnnctcnnnnnntctcnactcccnnnnnnnnnnnnncnnnngnnnnnnntnnnnnnnnnnnnnnnnnnnannnnnnnnncannnnnnnncnnngcnnnnnnctngnnccaannnnnnnnnnnnntnnnnnnnnacccacnnnnnntcnnnnnnnnnnncnnncatctcttcnnnnnnnatacancnnnnnnnnnacnnnnnncccttcnacnnntnnngnnnnncnnnnnnnnnnnnnctccnnnnnnnntccccctnnnnnncntttnnnnannnnncaannnnnannnnnnannncannnnnnnnnnnnnnnnnnannnnnnnnnnnnnnnnngtcnnnncnnnnnncntnnnnnnnnntcnnnttcnnnnnnctncccnnnnncctcnnntctnnnnnnctcannnnnntcnnnnnannnnctcnnnnnnnncnnnnnnnnntcccnnnnnnnnnnnnnnnnnnnnnnnnnnncnnnnnnnnnnnnnnnnnnnnnnnnnnnnncnnntannnnnnnnnnnnnnnnnngcaccacnnctnnnnnnnnnncntnnnncngnnncaacannnnnnccnnnnnnacc

SEQ ID NO: 4702 - DNA, 400 bp, Zea mays
gctggatttgaaccatgggatattacaatgtcagacctcttggctgggaagtcttctctcaaggagttccgtgggattgcgtttgttggtggtttcagttatgcagatgtgctggattcagcaaaaggttgggctgcatcaatcaggtttaacaaacccctcattcagcaatttcaggaattctaccataggccagacacgttcagccttggagtatgtaatggttgtcaacttatggctcttcttggctgggtgccaggatctgatgttggaggttctcttagtaaaggtggagatataacccagcccaggtttattcacaatgaatccggtcgtttcgagtgccggtttactagtgtgtccattggggtttctcctgctattatgttcaaagggatgg

SEQ ID NO: 4703 - DNA, 403 bp, Zea mays
tactcatctatatatttttacgatattctgaaaccttatcttgcttttcctagaaaaaaacttgttttttgggtcctaagaaaatcttctttggcccagtcaagtgttttccattgaccgtttccttctatatatattgcagagatccaaaagtttgtggaaatcaggaaagaaactgacgaagattccacagctcaccaaagtgaaatcgaatggagcagctcacctgtagaagaactaaatgagaagataaagatggtcgaattgaaactggaagaggccaccatgctcatcaatgagcgggattcagaaatacttgaactagatgcactcagccatgtacaaccacagaatacagtagcatgtaacaactatccgctgtccctacagtctgatagaagtt

SEQ ID NO: 4704 - DNA, 393 bp, Zea mays
tgggaggaaactagcgcagtacatatccaaagtctttttctttgttttttttctctcttttcccttttgtttgtgcgttctgggcaattcgcggttcgacgatcagttggttggcaatggttggttgatcgattggcgtcgttctccacatgtgcaggaccgagcttcttgatctggttcggaccgacgcctcgcctaacggtagcggagccggagctggtgcgcgagatcttcctcacgcgagcagaggcgttcgaccgctacgaggcgcatcccgtcgtgcgccagcttgagggcgacggcctcgtcagcctccacggagacaagtgggcgctccaccgccgcgtgctcaccgacgccttctacccggacaacctcaacgtaagacagagg

SEQ ID NO: 4705 - DNA, 375 bp, Zea mays
gggcgctctctgtgatttctgtggggagcagaggtctatggtttactgccgatcagatgcagcatccttgtgtttatcatgtgaccgtaatgtgcattcagctaatgctctttctcggcgtcatacaaggacacttttatgtgaccggtgtgcttcacagcctgctatggtccgctgtctagcagaaaatgcctcgctttgccaaaattgtgattggaatggccacattgcaggatcctcatctgccggacacaaaaggcagactataaattgctattcaggatgtccatcgtctgcagaactttctagaatatggtccttcgtttcagatattcctaatgtagcacctgagccaaactgtgagcaaggaataag

SEQ ID NO: 4706 - DNA, 1058 bp, Zea mays
tgagaggaggagttcgattttgaggaggatgagccaaagccaagagtgagacgattgctggatgaacaatttgatttggtgagcctacttaacctaatactccctttgtttctttttatataagtcatatttggattctgggatgtctttagaaacatactttgatcatcaattactcttacaacactacatcaattgcatcaaaattagttcctaaaaaatagatgtggaaagtggaatccaaacttgttgatataacttcaaatatactaagtgtgcatataatttgaataattattgatcaaacaatctacgaagtttgacatttggtcttttgtacattggaaaaaatggtaagtttacatgacaaagtcattatgttgagcttgtaacatgtctgttataaattggggaaaattgtttagaaggctcggtgatcatatgcacataatattaagtatttaagtaatacaattccttacgcaaaacaaaaatgaaagttcactttgattaatatgtaggaaacatatctgttgtgtcaactgtacttctgcctttatagctcgttggagaattagttttttctctatcaccggtagtatagaacctctggacaggaaaaacaaccaataattattagttaacatacacgatgtctcatcattcattagtgtttatgacatctatagttcattattactccattgctcaaagttttgagtagatgttgcaaatgctgtgctgaaaaatacttcttgcgaataaactttcagcttgctttggaggaatatggagacagtgatgatgatgacatgggtgttaaaggtggggaatatgaactgccaaatgaggctattgatgaactgaaattgttccaaaatcagaatgtatgtgttgatgaagaatatagaacaccagcagattttgttcgtcaaaaactggattcaagcatggctgatgaggtggatgaatctgctcttgtgataaaaaaatgtgctgaatatgctgaaatatatttaaatgaaactgcagaagaagaggtggttgtgctgttcgaa

SEQ ID NO: 4707 - DNA, 409 bp, Zea mays
gcttgtcgcgccaaagcaggaagaggaggtagcaccggtttccgctatggtatggacgaaacaagtatgggatgacagaacagcaattcctagggggagccaaatgaacagcaattcataagggctacagtgtttccaggtaggacatcttgtccacaagctgtacatgattgtggtttgtcattgactcttggatctggtgtacccgctgctggaattatactctcctatgcattttgtgaaagactgactggatgaagccttcttagtttatatactgtcatcatgtatccatatgtggcaggagttgggtccagatccagaaggcactgttgtgcccttttaacattgagtaaaagatgtatatacagtagaaacacagatcgggagtagcaatatcttagacgga

SEQ ID NO: 4708 - DNA, 439 bp, Zea mays
ttcatccgatactacctccctttcatgccaccgttacgctctagtgctgcgccgtcgtcttcgcctccgccgctgacgacaccactgacaccgtcgcaaacgccgccgccgccgccgccgctgccacaaaacccgcagctgcggtcggcgggcttcctttccccgagcggcgtcatgcacaacatgaccgacgaggaactgtactggcgagcgtccatggcgccgatggtccgccgcacgccggacagccgcgtgcccaaggtggctttcttgttcctggtcagggggaagctgccgctccggcctctgtgggagaagttcttcgcgggccacgaaggccggtactccatttacgtgcacgcccacccgtcctacaccggctcgccgccgacggactccccgttctacggccgctacatcccgagccagataacgaaat

SEQ ID NO: 4709 - DNA, 360 bp, Zea mays
agctgctaaacctggggatcgtggggctcatcacctgcgcctcttcgctcctcgccggcattatgatcgccgtcctcctgccgctctcggaggtcctcgccgtcatcttcctccacgagaagttcgacgggccgaagggcattgcgctcgtgctctctctttggggcttcgcctcctacctctatggtgagaaggcgcaaaagaagatggagactcagaagaacgagctgcaaatggtaaagaaaactgttgatctggagtcggctactctttgaggatctatgtatttcttcatttctgttttattgttgtgacagcatgtatccgcaattccgcatacgcagaggcatgcaagtatag

SEQ ID NO: 4710 - DNA, 423 bp, Zea mays
  misc_feature (7)..(8): n is a, c, g, or t
acaagcnnagttagcaactgggaatctgagataattaagtggttgaaaggcagagtgcaggtgctggccctctgtgaaagcacacgtgctgatgttctttccggaattgaaagtttcttaaaacccttgagccgtctccatgttttcttttgcttactaattatttgttaatatacactatactaaatgaaaatgtagctgcaagttaatgacaaattctgtggtgcatgaataatcttcaggtacttatcatatcttatgagactttccgcatgcattcttcatgcgcgcaccaagtgcgcgcagtgccataccgtggagcgaggtggcgcgcacaggcaggggcccaacctgcacggcctcttcggtcgtcagtcaggcaccaccctcggctaagcctactccacgaccaacaagaacatg

SEQ ID NO: 4711 - DNA, 599 bp, Zea mays
atggatggtcgttagtttcgagataaccttcccccagctgctggagatggcaagagacttgggtctcgacgtgccctgcgacgagccatccctgctagctatctatgcaaggagagacgcaaagctcgcaaggtatttggcgtgcagtgttattattaaattatacgtagattatccatatcttttatgagattgaattttgtgatgtgattgattctctttttttatattcccttgttttagaatccctaaagaattactgcacgcttcaccgacaactctgcttctgagcatagagggaatgccgggcttagactgggagagactactgaaactccagtgctccgatggttcgttcatgtcatcgcctgcacccacagcctacgctctcatgcagaccggcgacacgaaatgcctcgagttcctcgatggaatcgtcagcaagtttagcgggggaggtacataaactaaagggccccatgaatttctttcctaagtcacataggtttcaagaccgatcatatcttctattgccttccatgaatatgcagtgccctttacctaccctgtggatctgttcgagcacttatgggtagtga

SEQ ID NO: 4712 - DNA, 335 bp, Zea mays
cagaaacgcatggaagccaaggcggcgggtcccttcacctgcttctcctccagcttgttgggcccgaagatggcgaggcgctgctccgcctgctccgtggtgagaccctgcgggctgcatcggaggttctcgaacacctcctcgatcggtatgttctcctgcgcaggcgcaaaacagcaccgcagcaaagtggtgaagcaacagacaagaaccacccgagtttagtgttatcgggagacccgcgtaaaagaagatcaagaattggtgcgttgaagcggcggaaaaccacacgcacacaaaacaaaaggcagacatgacggtaaaaagaaagaaag

SEQ ID NO: 4713 - DNA, 421 bp, Zea mays
ctatcgttggatctaatattaaatagtatagtctgcttgtacgttagatcagacaagtgattgtacaaaattgagctccattttagaagataagctttggtgtctggtcctctttccttgaatccaaacccaagctcttggttaccttcggaaggagttggtgagctcgacggagctgaaggacccaaggttcttgtacggccccggcgagagcccatcatcagcggcaccaatctgccgcctcgcgtccacggcgctccgccgtctcctgtcccacaccctgtacgccccgaatgcagcagcagcgaccaccaccgcgacaccgacaacaaggagggccgccttgaccccgctcgcgcgcccaccgccgtgccctcgcgtcccttcctcctccaggctcctgatcttgaagtagcccata

SEQ ID NO: 4714 - DNA, 385 bp, Zea mays
aacacatccgcaaactcttccagaattcctgttagtgtctcatttccagccacatcttcctctcctttaacctcctccaacatcacaaacacccatacttcatctcccttcacccacttttctaactgcaaaacagacacctgttgcacctccctctttaggtctgcttccccttgaagtctaacctccaccccctgatcacaaaaggttagcaccttgttgatccagtcacaatgcattgggctatgttgtttcaaccagtcataccctaatatcacatcataagcctccaatgccaacaccctcatggcagttctataaacatgccccccagccttccacttcacctctctgacattttttcacacaccatgatctctccatt

SEQ ID NO: 4715 - DNA, 373 bp, Zea mays
ttccggcgagggaccccacggtgaccgtggagaaaccggccaccgcagcttcgctgcagctggtggtagcagcagcagcagcacctgaaccagcggtggctcagagcatgactacgggaacagaggccgagccgtccagctgcctggggtcttgccttcggcacatgttcagcccgccggcgcagggggaggactacaccatcctgcaggcgctggtgagcgtggacatgctggtgctgttcctggccaccatctgcggcgtgggcggtacgctgacggcgatcgataacatgggacagattgggcagtccctgggatacccggccaagagcatcaacacgttcgtctccctcatcagcatctggaactacaa

SEQ ID NO: 4716 - DNA, 501 bp, Zea mays
agatctgcagcagggacgagcagctagccatccatccatccacatgggccgttggttgaagccagatgtacgtatatacgcgtcgtcggccactcaaccatgcatcgttgtttcgttctcgatgtcgtcgctgcagagatccctgcagtgaaccggccgcgcgctcacgctcacgtctatttgtctttcattatgtgcgtcgtgcgtgcatgcaggtgtacccgctgatcgcggccatgtcgttcgtgacggggatgtgcgtgttccagctggcccggaacgtgctgatgaacccggacgtgcgggtgagcaagagcagccgccagagcgccgtgctggacaacgccgtcgagggccagcgctacagccagcacgccttccgccgcttcctcgccacgcagcgcccggaggtcttccccgccctcaacagcttcttctccgactccaataataataacacccccgccgacaagtgataaattcatctcatcgacggtatgg

SEQ ID NO: 4717 - DNA, 362 bp, Zea mays
tactgctttcggcgctggtacggttggattacaaccgtcgcagccgaatatgaacgcaagcctgatggccactccacctgcggtaccaccacctgtccaacccaatccgtggccctgggcgcagcaacaaacaggcatagtccaacccggtctccctgttccacctcagcagcagcagcagcaacaacaggctccccagaggcagcaacaacaacaggctccccagagcttccagacgctgatcgccgttggtggcagtaatggcaactctatgctcatacctaacgcaggcgcatcggttggtcccgccaccgtggcggcgaaggaaaccgcgcctccagagagcaagaaaggagagaaga

SEQ ID NO: 4718 - DNA, 404 bp, Zea mays
gggttcgaccccgggagcagaacgtggacctcaacatctccacagctcccgacgaggatgagccagggaaacccgctggcaccttgttccctggaggcaacatggtggccgtgccgtgcgccaactgtcacctcctagtcatgctctgcatgtcctccccatcctgcggtcctgccccaactgcaagttcgtgcagccgctgccaccttctgttgtgccgcctgcctatccgaggctcggtgccgccgtcaagccgctggagaccctcagccttctccattaggcgcatgcacgcgcgctccactggcagaagcttgtagaaaggaggaaaccatagttgagttgtgtgatgcatgggttagtattactattacctgggtaatggctgtatgaatgtgaacccc

SEQ ID NO: 4719 - DNA, 497 bp, Zea mays
  misc_feature (481)..(482): n is a, c, g, or t
  misc_feature (487)..(489): n is a, c, g, or t
tcctgtcaaatggagaggatgcgtcaactggccagcaagatgaaatggaactaaataaagctgaagttcaaattgatgatctgtcaaaagaagcaacaaaacctccttggaaagtaaccagagaacttaagccaccacttgtcttcttcggcgagacatcccgcccctcgtcgccctctcccagtcctcctccgcccgcaccaagctcaaaaccaaggtacacacaccaccaccaccaccacgtctcgcattattcccagcattcaacagaaatatccgatcaattcgcccgtctcagcttaactcgcaaactaatgcgcttccggttttttcccccgattgcgcaggcggagtcgctggtcgagatgctgcggcagccgcggagcccgagcctccgcgctcgaccagcggcggtggttgcggcggagtgacggcccccttcccaatcatccccccacttgtcttcttcggcgagacaagnnaatgnnnggtagggg

SEQ ID NO: 4720 - DNA, 444 bp, Zea mays
tagatgttgacggtgaggaacgagccggtccgctgcaggagctgcagcatgggcttcatcaccggctgcgcgatgtcgtcccggaacctggagccggacggcgggaacgaatccctgacggccgagaaggcgatcggcgtggacaccttgacggcgttggcgaggcccagatccgccagcgccttctgcacgttcttcatggcggggacgagggtcatcttgtccacgttcgggtcgtcgaacacctcgttcccgacggcgacggcgttgatctgcgtcctgggtaagtacttcttcacgttgtcctgcacccactgcgccgcgtacaccgggtccctggccgcgtgggccaggttctggttgggcatcatcaccatcgccttgatgcccgtgttggccagcgacgtcagcacggttgcgttggcgtcatatatcttcaccatg

SEQ ID NO: 4721 - DNA, 400 bp, Zea mays
gccatctaggcttatgaacaaagcctaatcattcaccgccgacgcctcgatgctgtggctgtttattctgaatttgtggaaatccttagaaggtgctaggagatagcaatttgttctcaccaagcttaggaacagtgtggccgcacggatgacgtatgacaagtgggtccgcaaatgctcggacaagctcttcgctgtgaaccttcataaagtcctcttcacctgcacacgtttatcccgtgtgtcagaaagagggcatgcttggaacacttggatacatgagaagtgatgaatcttgcattaaacggttcagacattgctgcagaaactggccaaaaagttcaggctggcgttcacagccagtttcggttttgactgaggtcttgttcggttaaaagtg

SEQ ID NO: 4722 - DNA, 412 bp, Zea mays
ggccgaactgctgccacggcgtgccgcggaactcgggttgatcctgtgctcgatcgcccataccacgaatccggtgaagcagaagaaggcgaggctggcgactggcgagccacaggctggtggtgagcggccgcaggaagatccacatgctcgtgctcgtttccgtgcgcaccgccaccaccatcgaccaccccgagtccgtgaacggcatgctgaagtccgcgctgcccatcctgctcgccgtgattgtcacgtcgccgacgacgatgtcggctatctgcagtcatcattggtggtcactggtcagcacacatacacaccctaccctacctacgtgctctctctgtctctcatgcttggtgtgtactgacctgtctcggcaccagcgacacgaggctgtcgtaggaactgg

SEQ ID NO: 4723 - DNA, 380 bp, Zea mays
cttttgcgacttagaaaaaaaatgatgcatcttaacctttgttcgctaactggcaacacaatcagttgtggtcgcaaataccaagtcaactgtttgttggattcttatcattgaagattgtttttttccttctgtttaatgccatttaacctcttctgaaaaatcttcaggtacctcctcttcagagagcacgacattttgggcacacttgtggactgattcagagcatcagcaagcctgtcactagtcgttggttctagacttctagtgtgagatgcgtagtatcagatcctgggatcaaaatccctgagaaagaactctgaactgtcgtgatgtcatagattttgtgatgaaacatcataattgcctgcttcttgttg

SEQ ID NO: 4724 - DNA, 621 bp, Zea mays
ccttgaccatgacagccagtgcaagatgaagagcagcgtcagaaccaagactactagcaatggcgtgaagccgtcggcaggtggacgggtcggattcggggagcattcagacccgcagattcttagcttgcttcgagcaaatgacgtcgacggccttcaggtgcttctgaacgccgacggcaaggaggtgtgggttcaggtgccggccgatccgtcagcgttctttgtcaatgttggtgacctcctccaggtaaaggcattgatttacttgtaaataaatcagtactagtagattaactgaatgaaattgcttcttggagcagcttagaaattaaattagcagactctgaatccaacaataaccaaacactaatacatggcgatattatctctcatacttggcttgaattcatctcttttccctttcttggtcgcaggctttaacaaatgggaagctggtaagtgtccggcacagggtaattgcaagctccagcagggcaaggctgtcgacaatctacttcgcagcgccgccactgcatgcgcgaattttggccctcgcagagacgatcacagccaacgcacccagccagtaccggcccttcacctgggccgagtacaaga

SEQ ID NO: 4725 - DNA, 609 bp, Zea mays
  misc_feature (383)..(384): n is a, c, g, or t
  misc_feature (386)..(387): n is a, c, g, or t
  misc_feature (553)..(554): n is a, c, g, or t
  misc_feature (590)..(597): n is a, c, g, or t
cgatcatcttctcctccaccaagaacgcccagctccccgacggccaagttcccgtgccggcgcagctcgtaccgtcgaatccggtgctgaattccgaggtctcaccggcgacagtgagccaaggtcctccagaccatcctcccggcgctcgtccgtcgccgcacagcggcgtggccaacggcaagcaaacgccacggaatcccgtcgctacctcgccgagccaggatgaccggtccggggcagggaaagagaaccagtcgtgcagcaacacgccgagcacgagcagccgccagtcgccgtcgcagcagaagacgcccaagtccagggcgacgccgccgcctgacaggcgcagggttactcctgctcagatggtgttcacaagnntnnggaatttatggatgcttgcaatgcacataagcatgagatgaatcaagtgagtacacattctccgaactcttatttattatatttctctacagcatctacacaaatgtcatttatgggtaatgcagtaactgggcataacaggaattttttcaccttctccaccgcnnccccaatgtagccactttccaaatacaccacttccnnnnnnnncccctccgacct

SEQ ID NO: 4726 - DNA, 677 bp, Zea mays
ctctggctttgtcacgttgtaccaccggggacagatcgtgcgcagttgttaagttctgatgtagcgctcgctcttcctacagttactaccctctatatcctcctgcccccggtgtgccgttagacttgtcactcgctaaggaagcgctggagatcccatcagcgccagatgttctcctccttccttctgatctcgcaccatttgtgaaggtaaacaacaaatttgcagcgcagtacagggcagcgcatctcttgtagaattctaattgatatcagtcaatatatatcgttcgaatcctgcccacccgtgagctcgttgttcagaagccaagtgcatccacatgtctgtcgtttataataaagtcacttcctttacttctgaatggggtgatgctaaacaggtactatgtttgcgcaggtgctactcctctcccttggagaaggtagcgacgacgacagacggtttatctgtgtgaaccctgggaggttggcgaagggtattggcgggggcacatttgtggagctttactacaacgagggcatcgacaagaccaatgcctccatcatccgcatataggatcgctgaaactagggtgcgccgcagaaaatcacgtacgtagtttttgagctcggaaaatccatctcagcgtttgttatcccaggaagtgttgcttaaca

SEQ ID NO: 4727 - DNA, 487 bp, Zea mays
  misc_feature (384)..(386): n is a, c, g, or t
  misc_feature (388)..(391): n is a, c, g, or t
  misc_feature (400)..(401): n is a, c, g, or t
  misc_feature (422)..(424): n is a, c, g, or t
  misc_feature (426)..(427): n is a, c, g, or t
  misc_feature (439)..(442): n is a, c, g, or t
  misc_feature (449)..(451): n is a, c, g, or t
  misc_feature (462)..(463): n is a, c, g, or t
  misc_feature (470)..(470): n is a, c, g, or t
gagggcaacagcggcggctggcaataaaagctcgcgtcgaccgcccctgccatgcctccacactcctccctgtctcggcttcgattccgcacttcccagttcccttcccacattcccacacccgcctgccttccttcccgtcgccttcttccccgctcctccgtgtcccactcccgtacgtgatacgccctcgggctcggagaaggaaaagcccgctctggcaccagctcctcctcctcgcatcgcatctcccctgccagggaccaggcatccctcgtcccggtacgtcgtgcctcctcacctccctttttccaaactctcgtctgctgctttacttcgccccgccccgccccgctggcgaggttgagtttattggtgctgccnnntnnnngatgctaannaggtactatgtttgcgcaggnnntnncccttggaaaannnngttacannnagggaggttannacgcacngagcactgggaggaggg

SEQ ID NO: 4728 - DNA, 410 bp, Zea mays
tctcgtcggacaccatgcctcgcctcaaacacctccgcttcaccgaggtcagcgtgacggcggatgacaccaaagccgccatcaccgtgctcgccgatgacctgaggactctccgcatgtcatgccggcgatgtagctatactgaatcgccatcgaagccgctcatgttcatgtgcgacggggacggcatggccgcattcaccaaatactcattggtccgcttacgcgcacccaagctggcggtgttcgagtggcgatgctgctacgctgacgaggtgtgcgtcgacgccgtgggtcgcctctccaacgtcgcgatcgagatcgccgccggtaggacacggacgagggctcccataggcacggaacctaagtttgtgacagtacaacaacgtgacaaacttatgaccgaa

SEQ ID NO: 4729 - DNA, 530 bp, Zea mays
tccggtggccatggccaagcccccgcttcagacagcaacgatcatcctgctcgtgctcctcttggccgcgtcgtgcctccacaccgtcgacgccgccgctttaggtaagtgcgtacatactactactacgtgcgagcgacgcccttagcgtggttgtcgtccgtctcgatctcgtgcgtgactgctggtgaccgctgacgccggtgctcgcgcgcatatgcatgctgcagggttctcctggggcaagtgttgcgttcggtgcgcgaggacgaccacgcggcgggcacgggaggcgtgcatgagctcctgcggcctaaaatgcgagttttgcaaatgcgggcctgcgatgccgccgcgcgacatccatgactgcccctgctaccgcaacatgctcaccgccagccccaagaagaggcccaagtacccttgagactgagactgcgaggccggctcacacgacggcatccatgggactgcgactgctgcttgcaactgcgattcgatccatgctgggccatacaacctgttat

SEQ ID NO: 4730 - DNA, 535 bp, Zea mays
ctctttccgatggccatggccaagcccccgcttcaaacggtcacgatcatcctcctcgtgctcctcacagccgcatcatggctccacaccgtcgatgcttccgctttaggtacgtgcgtacgtactactactatgtgcgagcgacgcccttagcgtggtcgtcgtccatctcgatcccgtgcgtgactgttagtgaccgcgcactaacgctggcgctcgcgcgcatatgcatgttgtagggttctgctggggcaagtgcagcgttcggtgcgtgcaagcgaccgcgggacaggcgcgggccgcgtgcatgagctcctatggcctctgctgcaaggcgtgcaactgcgtgccgcacgacatccatgactgcccctgctaccgcaacatgcccaccgtcgaccccaagaagaggcccaagtgcccctgagacagagactgcgaggctggctcacacgacgacatcaatgggacagcgactgctgcctgcaactacgatccaatccatgctgggccagacaacctattatgttatggt

SEQ ID NO: 4731 - DNA, 399 bp, Zea mays
ttccctgtgcatggcgcaaaaaaatctcccagccgtgcagtagctctgcgcgctcccctcggccaccatggcgccctcctccctactccctgctggcgagcagcagctccatggcgcccagatttttttccagcagagagcttcttccctgcaggttgccagcagccttctccctggccgccgagctccctgttcccctgctccaagggcgcgcacccacctcccagcgcccttcttccccctagcgctcgctccctgcaggcgagcagctcgaccccttcctccctgcgcagcagctctgcccactccaccttggtcagcgcagggcccctctgatccgagctcgagcagtgagctcaccgtcgctcatggagcccccactccctgctacactttctc

SEQ ID NO: 4732 - DNA, 383 bp, Zea mays
agccgttcagctacggcgccggccacgtgttcccgagccgcgcgctggacccagggctcgtgtacgacatgaccgtcgtggactacctcgacttcctctgcgcgctcgggtacaacgcgacggccatgaggacgatgaacaggggatcgttcgtgtgcccggccacccccatgagcctccacgacctcaactacccatcaatcactgcgcacggtcttcccgccggcacgaccacgatggtccggcgcaggctcaagaacgtcgggctgccggggacgtacacggccgccgtcgtcgagcccgaggggatgcacgtgtcggtgataccggcgatgctggtgttcagggaaaccggtgaggagaaggagttcgacgtgatttat

SEQ ID NO: 4733 - DNA, 407 bp, Zea mays
  misc_feature (398)..(401): n is a, c, g, or t
ggcggctattcacgagctggccggagctcatatctttccaagtgcagaacaactcgcttcagggcagaatcccaccggagctcggcaaggcgacgaagctgctaatcttatacctcttcagcaacaatctcaccggcgagatcccgccagagctcggcgagttggcgaacctgacccaactggatttgtcggcgaacctacttaggggatcgataccaaactcactcggcaacctgaagcagctcacgcggctggagctcttcttcaacgagctcaccggccagttgccgccggagatcggcaacatgacggcgctgcaaatcttggacgtcaacaccaacaatctggaaggcgagctgcctcccaccgtctcgttgctgaggaacctccggtacctnnnncagtgt

SEQ ID NO: 4734 - DNA, 724 bp, Zea mays
cagttcctgcagcacaagtgacgcgcaaaataaggcccagacagcaaatgcttatagaagcagcagctttatgaacccaataacagtgtgacacaaaaacactaaccaggaagaatgtttccacttttatcagtcatatcacgccttccgtgaacctcagggaaaagccttgtgtgatgccttttctgaacaaccacaaacgtcactgggggtagatatccctcctccaaagaagcacaagccttgaaatggaaagggacaaaaccattgacatgggcatggcaatgcaaaccatatttcaccgacaaattctgatgctggaaatcatacctttctgatagcatccatttcatgaaggagaacatggctgaattgaccttcacttacaccgtccctgcataggagtgataagtcaacatacttcactcaacagcatacaataaatgaaccaaaaacaggaatctggaacacatgcctatagaatattatcctctcaggctttctgtttgtcttcttgcggaaagcaatcagtagttccctgcaatgccagttacccagatgaaccattcgacaactttcaataggtcaactcaaatcaataaaaaaccttacctgatcatgccaccattaacgttgtgccccatctgtggatctttactgacagtaaataaatcttctattatctcttgtcggggtggttgagcagaaaccagacctctgtact

SEQ ID NO: 4735 - DNA, 731 bp, Zea mays
ctcgcgtgagtgccatccttgttcctctcgtggtcgccattgtcgtcgtcgtcgtgacgtcgatcctcatacatagctgaggcgcgctgaggctgaggctgacgacgctgctgcttgtgttcttggttcagagggaaccgaagggaggaagctgtcatgggtgcagaggatctcggcggccatcggcgtggccaagggcatccagttcctgcacgggggcatcatgccgggcctcttcgccaacaacctcaagatcaccaacatcctcctggaccagaacctcgtcgccaagatcggcagctacaacatccccatcctcgctgagaccgccaaatccgaggtaaaaccatgacgcacgcagccggcgccagccatttcttctacattctcaatctcaacggtgctgctctctttctttcttccttcctttctgtctgcgcgcccacctgtttgctgcatcgaatgtagggaggaggaggaggaggaggaggaagcaagtatccatctgacagcaggtacgtacgtgcggtacggcgcgcggtgaaggttactagctgctgttatgggatttctaacgcccatggcggaacacatgatgggatcttgttgccattccatcctgtagggtgccccccaatggcgacaagatcgacatctacgatttcggcgtgatcctgctcgaggtcgtgaccgggaggcccatcacgtccatacacgaggtggagggcatg

SEQ ID NO: 4736 - DNA, 378 bp, Zea mays
aacgcggagctggcctgctccggcgacgcctacttccacagcaccgaggacgcgatcgagctgaccaagaacggcatggacaaccacaacaacaaaagcgtcgggcggctggtgtacacgcagccgatacccctctggaacggcgacaccggcgagctcgccagcttcaccacctccttcaccttccggatcaagcgagcacaaccggggtccccgagcggcgacgggatggcgttcttcctcgcgcaccaccccggacgggtgccccccagcagcttcggcaggaacctgggcctcttcaacgacagcaccaacaggaacgccacgggcgacgaccgcgtcgtggcggtcgagttcgacacgttcgagaacgacaaa

SEQ ID NO: 4737 - DNA, 417 bp, Zea mays
ctgcgtgttcgtggtgctttgcttgctcttgttctgatttctgaagcagggcaccatcctgcgcctgcgggccacgagacgtgctctgtacatagcaaagggtgcgcgatatggatatggtgctggtgcggcagtgacctatatttggtgattgcatgacggggcgttcaagatgttaaattgagaagcagctgagttgtggttctagaaaggagaaatcggtttcgaaactgcaaaggacccttgagaagattatcagaagccatcgtccacatgttcatgcgcagacagtaacacataagccatcgtccacatgttcatgctactggtaatatagagcgtcagggaaaaaaatgcttcagtatctaaatgtcacgctaccattttgagcgctttgatgacctgtgcacctgtact

SEQ ID NO: 4738 - DNA, 978 bp, Zea mays
  misc_feature (60)..(62): n is a, c, g, or t
tttagcaaggtacacatgtagtgcccacatgtagatgcacacgttagaaatactctatannncacacttcatagctgtccttaacacgtcattgtttagttataactaaactgggagcagtagtacaatataaactgaaccctaagaatcaaacgaccctatttgggaaacactggaaatttagcagacattgttgaatattaatgtactaggaaaagatggttacttttgctacttgagttttttgaggaaattttaacattttgcccaaaactgaggtgtgtgtgatcttgtccttgtggatttcactatgaaatatttccacgaacattccacaagttaaataatatttctagcgtggagtggtttagaagacattgttcgattctgagcattgcattgatcataaggtcttccaagtgtacagtatggataaccatgtctcaacatgtactgactactagcttaaggaaaggtttgactaatatttttttatgattggttatatacatacatggtgtgatgattaaattataagccaattaacatacttttcactatgtatatgaaggcattgcaagaaagtacagactcaatagaccgtgtggcttgttcagcgactccactagtcacagaaaaactttgggtggaaaagtatgcaccgaattctttcacagagctattgagtgatgagcacacaaaccgagaggtaaagctattccaaattgcatcttgctacttcaaagtcaaggtttccgtctttttcctaacatctttcacttgacatgtgtatgtgccttgctcaggtacttctatggctaaaacaatgggactccattgtttttggatcccatattcgggctacaggtgatgatgtcttgtctgccttacgtcgacactcttcaaccatccaaaagaatgcaagtaacagaaattcttttccaagagtaaggggggtcctgtgcaagtcaagatgca

SEQ ID NO: 4739 - DNA, 392 bp, Zea mays
atcgttcattctttagtatttattaacaactatattctatgctttatattcttacagtagaagattatatatgttcaaccaaatggacataattagtgctgttttgcaaaagcattttggattttccagtctcaaagcattccaaaaggaagtcttggatgcttggtttggtcatgaggattgtgttctcctagcagccataggatcaggtgcgttttctgtaattctcctctttatcttctgtaatttattactaccgctgatgtgactttgctttttatatgggttgtaagtgtcagtaatcttttttcataacttctatcattattgaatacttatattttgtatccttttttcgctgaaccttcttgccttatgtctgaacatgcaac

SEQ ID NO: 4740 - DNA, 410 bp, Zea mays
tcgttgctcggcggcggcgacagcatccgctcaaccccagccatgttgttgcccaggagctcgttggccagctcatcctcgagatcgttctccaccagccgcttgacaccgcggagcacatggagtgccaatccgtcggcgagcctgagcactatgatcttccagtacgcggtcagtcgtgccctcaagtcgaatgcctgcgctgctaagtcagggtgcgtcctaagatgacccacgttcacttccccgaagcattccagggtaaccttagatggctcggacttgttctccacagaacccatgaacttcttctggcctaccattatggcttcccaagtcttcatgtagtcagggctcgccgtgtagcctgccaccagctccatctctatcatctccttggacgtgctgag

SEQ ID NO: 4741 - DNA, 517 bp, Zea mays
  misc_feature (360)..(360): n is a, c, g, or t
  misc_feature (386)..(386): n is a, c, g, or t
  misc_feature (440)..(445): n is a, c, g, or t
  misc_feature (448)..(448): n is a, c, g, or t
  misc_feature (492)..(494): n is a, c, g, or t
  misc_feature (501)..(502): n is a, c, g, or t
  misc_feature (505)..(508): n is a, c, g, or t
cctacgacggcaaggccattgagctgtggctgagcacgaacgagacgtccccgatgaccaacctgcgtttgcccaacaagagcctgataccgaatcactcccttcgttctgcgatcatggactggaggtcgagaagcaagtgacttgtgatcgtgattcgttcagccctcgggattgcatgcttcttgatgccgcagcggtgaccgatttgtcttgcacaacgaagctgccaggggtttttttttgtttattttgttctaagaaatgtatgcgagtagtattcagatagggttttagaggttgtgcagcagctcaagcaaaaatgtaaaaaaaaaaacgtcatctgatagcattacctcnctgtcaggggatgccctttttttttncttttttgcttgagctgctgcacaacctctaaaaccctatctgaatactactcnnnnnnttnataaaaaaaaaaaaaaaaaaccctgggcatcttctttgtgacannncaatctnnccnnnngcggtatca

SEQ ID NO: 4742 - DNA, 361 bp, Zea mays
gagggtgcatcaaggcgaagcaactccgtgtgaaggacgtggccgttggatcgaaaacctaggagttggtccatttcgcccccggtggagtggataggctctatgtaaataggggtagtttaggaagtgagaataaccctctataaatagaggggagggctggttggttcagcatcccttggctgccatttgttttgagcactcattctagagctcctagttttctctctaggtagacaccagttgagccgagggttccgcagtgattttgtacttcgactgtgttcttgattttcaagtttaatcagaggaaggatcgccggtccggcccacagggctcattggcttcaaatctcagttt

SEQ ID NO: 4743 - DNA, 632 bp, Zea mays
  misc_feature (490)..(492): n is a, c, g, or t
  misc_feature (496)..(503): n is a, c, g, or t
  misc_feature (509)..(514): n is a, c, g, or t
  misc_feature (519)..(519): n is a, c, g, or t
  misc_feature (526)..(528): n is a, c, g, or t
  misc_feature (530)..(532): n is a, c, g, or t
  misc_feature (536)..(543): n is a, c, g, or t
  misc_feature (545)..(548): n is a, c, g, or t
  misc_feature (555)..(555): n is a, c, g, or t
  misc_feature (558)..(560): n is a, c, g, or t
  misc_feature (564)..(570): n is a, c, g, or t
  misc_feature (579)..(585): n is a, c, g, or t
  misc_feature (587)..(603): n is a, c, g, or t
  misc_feature (605)..(607): n is a, c, g, or t
  misc_feature (615)..(615): n is a, c, g, or t
  misc_feature (617)..(622): n is a, c, g, or t
  misc_feature (627)..(629): n is a, c, g, or t
atgtcctcgacctccctctccgtcgacgacctcctcaggcgggtagcgggtacggtagggaggttggatgctggcgccctcagccagcccccgatgcgtcctgaccgtgggtatgtgtccctggtaagtgtccggtcctcctcttgctttccgccgagttttttatgttttcagctcttactgttgggattttcgttcgtccccaggggttgaggagttttaaactctcccttccaccagtcccggaggacgcggcggaccgaaccgcgcgtaggctcgccgcggagaaggacaaggagaagaaggacgcggaaaaggcccgagctcgtgagaggatgcgagctcgggaagccttggagaagcgccgtcggaggcaagcaagggacagactcccgttggagtcgttgccggacacgcctgatgacgacgatgatgatgatgatgatgatgacgaagatgatgatgatgatgatgatgatgatgatgatgnnnatgnnnnnnnngatgannnnnnagtcngatgacnnngnnngccnnnnnnnncnnnntccgccnacnnncctnnnnnnngcccaaacnnnnnnntnnnnnnnnnnnnnnnnnannntatttctntnnnnnntcttnnnctc

SEQ ID NO: 4744 - DNA, 372 bp, Zea mays
acttgaggtcgaggccaacgttgaccccgttgtaggcgatcggagcgaacatccacatatcatccgagctcaaaagctgcgcataatgaaaatgttttgaatgctactagtacatgaaatgaaatttcagcgcacgccagcaacaagattttggctataggggctagaatagaattttgcaagaaccaaccttgatctggagctgcaagaacttgacgtattgagctgcctcttcaagcatcgtgctgatatctacctgaaaaaacacggtcgtatgtatgcacaaacgttagaacgactagtcgttatcttaagcttttctgcttaaaaaaaattactgcgagttatttctgttgtcgatctctcaagcac

SEQ ID NO: 4745 - DNA, 777 bp, Zea mays
tctggtaacagttcgactgtacaaaactccagtcttccgggtaggttctatccatattgctcgttcaagatattctgctgcttcctctcctgcgcgcggcggcgtgcagaacgatacaactgggagtcaatcaatgtaatctgatttcaccgtcataaattatgatagaacaagcatatgctcacctgagctagacgacgctctttattcaacttcagagctcttcctttctcttctccggatctgaacattttctgaacgcatgcaaacagattctttagagaactgtcgctatgcccatgtcttgatgcctatcttactggtgactgttttttttccccaaccaacttagaaatgatacaatataatgtgcccaatacaatccaatagctatgaaaaggttaccttttcggtggctgacatgttttcagtacgatcaattttgatgtcaaagacctcatgcagcaaatcgttgtcctgcacagacaaagagaagctttaacactattataccaaaatacagtattccacagaaatatcaagttctgcttatgataacctgtgaatgcttcaggaatccccgcccaagaaaccgcctcatatagttcaactaagaaatgaacaacaaatctcagaaaaatttcaaattcggagcacagcattttgaggaaatgaaaatcaattcaagaaacggacacctgtattgattcacgccatgatgtaactcttaaaatgccattcttgcctgaaatcctaagtgattcttcagggcactca

SEQ ID NO: 4746 - DNA, 405 bp, Zea mays
catgtctgttctgcaccaagtagaaacaaaacttgtgaattgaaactacggtctgagattgaagaacagtgccagaaacatgagttagatgtagatgaacgtggcatgggtcctagcaaaaactctcgtgtgctaataggatctataattgtcgcaattaaagattgtagtgaacacttgctggacttaggttccaagaatgacccagtacctcccaatgtaaagacaaagaaacatgcatcagtcaaggtggtgcaacaagttacccatgagggaaacagaaatgaaggtgttcctgatagtgataaccgttctagcctcagtgttactacagatgaaatcagttattcaacctgctgcgatgcagatttggcagtggatgaacatttacaatgcaccacgtaa

SEQ ID NO: 4747 - DNA, 381 bp, Zea mays
ctctcccgagtggagtccttcctgactcctgagacctgaggtggaggaacatggaagtggagaagccgcatactaggaaacccaaggggagggagttgtgaggtagagggacatggaagtggtggtgacaagtatactaggaacgccaaggggagggagctaggaggaaccgcaggaggtccggactttctacgacacaagcagacggctaggccggaaccgccaccgccagcaaggatccaggagtccgggtccgcttttctcgtcccgcccgcaaagatcgatcggaacaactagcctagccctaggccctagcccagagccctgccctgcgcaccaaagcggaggggagagacgggagactagagagagcaaatacga

SEQ ID NO: 4748 - DNA, 411 bp, Zea mays
ataaaatggacttggtgacaagatgcatcgatttatctgagaatcgattatgcattatgccaaaacgagaaaacgcaactacacctgaacgtctcccatcattcttttctcgcttttcagcgtcctgggtctattcgaaaatactcacattaggtgtctctgtttatgaaagagaccgcaggtaagttgcaataactgctataattacggatcggatcaaacactctcattagatgcatggttttcgtgtttcatagaattttggttgaaagtggaaaccttagccacacaagcattcttgtctgatgtgtttcactttcacatgccttctggtttatagtacatattgggacgttttaagtgtgatatactgatatgtgatagatacttgaccatatgacgcaatggtaa

SEQ ID NO: 4749 - DNA, 389 bp, Zea mays
caggcgcttccagcaccagaagattataaggagcctgaacctgagaaggtggaggaagaggtgaagccagagccacccctgcagccacagggtgacttggtggatctcagagaagatactgttagtgcagatgagcaaggtaacaggcttgctctagctctcttccaggggccaccagctgctggtggaagcaacggttcatgggaggctttcccttcaaatggtggcaaccaggtgacttcggcctggcagaaccctgcagctgaacctgggaaggctgattgggagcttgcccttgtagagacagcaagcaacttgtccaatcagaagccagcaatgtcaggtggcatggacccgctgctgctgaatggtatgtatgaccaaaaaaa

SEQ ID NO: 4750 - DNA, 407 bp, Zea mays
gctgcacggtactataagtataagacacaactaaaacacaacataatacagtggtcatgtctaaaacatgtgtcttaccatattcattctaccaatcagagcattcaataaattaaagtgaccaatcagctagtcttctgtctcgaacatagagctaagacactgtgtcttcgtcaagatacatgtcttgagtttttttacattcaccccctagacacactctaagacacaacttaagacacccattgtacatgccctaaggggagtcggggtacggaaatggctatcctgccaattcaatcccagcgggagagttgggccttgtcatctgatggctatggcggcgatcttcaacttttggctccagcacctgcggctagccactcctgtactcaagaaagggagca

SEQ ID NO: 4751 - DNA, 393 bp, Zea mays
gctgcagtgcagtcataagcgtactagttagtgtcatgtcatctcatcaggactctgattgatcaaatcaccgtacgtgcacccggcccgcagtgggcgtgcaccacgagcgtggacttctcgctggcgcagctgatccaggtgatcatcctgctgagcaccggcggggccaacggcggcggctacctcgcctccaagtacgtcgtgcttgccatctacaccgccatcctcgtcgtgcacggcctcatcaacagcctgcacatccagtggctctcctggttcggacagctcggagccttgtggaacgtcgcgggcgtgttcgtcctcgtcatcctggtcccgtcggttgccaaggagagggcgagcgccgagttcgtcttcacccacctcaac

SEQ ID NO: 4752 - DNA, 656 bp, Zea mays
  misc_feature (196)..(196): n is a, c, g, or t
  misc_feature (340)..(342): n is a, c, g, or t
  misc_feature (344)..(344): n is a, c, g, or t
  misc_feature (346)..(346): n is a, c, g, or t
  misc_feature (348)..(351): n is a, c, g, or t
  misc_feature (353)..(354): n is a, c, g, or t
  misc_feature (364)..(365): n is a, c, g, or t
  misc_feature (367)..(368): n is a, c, g, or t
  misc_feature (372)..(378): n is a, c, g, or t
  misc_feature (406)..(406): n is a, c, g, or t
  misc_feature (408)..(408): n is a, c, g, or t
  misc_feature (410)..(410): n is a, c, g, or t
  misc_feature (413)..(413): n is a, c, g, or t
  misc_feature (419)..(423): n is a, c, g, or t
  misc_feature (428)..(429): n is a, c, g, or t
  misc_feature (433)..(436): n is a, c, g, or t
  misc_feature (448)..(448): n is a, c, g, or t
  misc_feature (452)..(454): n is a, c, g, or t
  misc_feature (458)..(465): n is a, c, g, or t
  misc_feature (470)..(472): n is a, c, g, or t
  misc_feature (474)..(474): n is a, c, g, or t
  misc_feature (490)..(491): n is a, c, g, or t
  misc_feature (493)..(497): n is a, c, g, or t
  misc_feature (507)..(515): n is a, c, g, or t
  misc_feature (517)..(524): n is a, c, g, or t
  misc_feature (529)..(537): n is a, c, g, or t
  misc_feature (542)..(542): n is a, c, g, or t
  misc_feature (544)..(546): n is a, c, g, or t
  misc_feature (548)..(552): n is a, c, g, or t
  misc_feature (554)..(554): n is a, c, g, or t
  misc_feature (556)..(564): n is a, c, g, or t
  misc_feature (567)..(568): n is a, c, g, or t
  misc_feature (571)..(575): n is a, c, g, or t
  misc_feature (577)..(581): n is a, c, g, or t
  misc_feature (584)..(585): n is a, c, g, or t
  misc_feature (587)..(591): n is a, c, g, or t
  misc_feature (593)..(593): n is a, c, g, or t
  misc_feature (595)..(595): n is a, c, g, or t
  misc_feature (597)..(604): n is a, c, g, or t
  misc_feature (609)..(615): n is a, c, g, or t
  misc_feature (618)..(631): n is a, c, g, or t
  misc_feature (633)..(633): n is a, c, g, or t
  misc_feature (635)..(648): n is a, c, g, or t
  misc_feature (651)..(653): n is a, c, g, or t
acctctgcagcagcagcgatggtcccaggacggacgctaccgctggaaggctctcgttcgcgtccccactcgagggacgagaaccagacattaaagccaaagagccggaggtcggtccgcgggtggcgctgacggtctcgtcagcggagaagctttctctagctgccaccacctcagcaccggcacgcgggatccncctgcccaccaacaccgcaccagcgagcaccggccgccccaaagcgcactggcaggtcctcactctcgtccttgccgcaaaaacgagaacgggactgtcccagaacacgaacaccaaaagagccggaggtcggtccgcgggtgnnncngncnnnntnntctgcggagnngnntttnnnnnnngccaccacctcagcaccggggggggggnangnctngccccnnnnncccanncaannnngggcggggggcngccnnntgannnnnnnngggcnnngntcccgtccccgccccnnannnnnaaagagagtnnnnnnnnncnnnnnnnncaacnnnnnnnnntatgnannncnnnnngnannnnnnnnnccnnttnnnnncnnnnngtnncnnnnncntntnnnnnnnntcatnnnnnnnctnnnnnnnnnnnnnntnannnnnnnnnnnnnnatnnnccc

SEQ ID NO: 4753 - DNA, 368 bp, Zea mays
tctctgcagggctcgcacgtgctctttttccctcctcaccccgaattaacaatcgcgaaatcccaggtttgacctttcccccagccttgttgttccagtggggcccactacacccatgtccccttcttcctcgcacacgcgggacactgcacctgagcctctcaagccctcaacacgccaatttgaccacgtgaccgtaatcttgatccacggcctccttgcacttgcaccgcaccggtgcctatttaacccgcgctcgaacaactctctgccggcaacgcaaccaaaccgctctcgctctcggctctcggctctccaccagtctccgctctctggacgccggaaatgcagatggactcctacaacaa

SEQ ID NO: 4754 - DNA, 433 bp, Zea mays
gcagcatgttacaattgtcaaaaagaatacaagctatgaactaatagtctctaatatcatgcaagcctgtatttagatacaacagcagccccataaaacgtcagcgctgcaacggttctgcactccgtgacaattctcactgaaggcagcaatgcaagcctaacgggagtgggaccactttttcacaagcaaaagcaactgcaagagtgcaagactggacagatgatgccaaaatgtcactttcagcccgggccaaaaaacagaaacaataataaataaaataaaaacaaacagatacgtattgatcatagtgggatttgaacccacgacctttagattcggaatctaacgcgatatccacttcgctatatgaccatgcttatcttttgcacatttacaaaatctaaaatggcaaaggtatcagaatccagaa

SEQ ID NO: 4755 - DNA, 387 bp, Zea mays
gtcttctgtacccagtactctattgctattttattttatcacaaccggcaacggacacacactatcagaattacactcacggcaacacaggtgatccatgagcccgcagcacaggggtccagttcctgtcatcgttttgtctgaacaccagggtccaggcagccaggcttataggtttgagaatgaactaggcagcttcggtgctccctcgaaagcccacgacgagataaggtggtgagcaatggcgtagggtcctgggacaaacattggagcaggctcgccgcttccaactttgaagtcggcagaggggttctgccctttctcagcgcccttgcagatctgatcgaccttggcagcgcttgttctctgggctttctcgtattcaag

SEQ ID NO: 4756 - DNA, 401 bp, Zea mays
ctcgagctcctgccggcacccagcaacaagagcgtccttatcggcggcatcaatcactgggctattagaagccctcttccgcttcagctgcttctgcacctccatgatagtatcaatcagcgtcgcaggagactgttgtgttgcctccaccggctggcctgatggttgttgaactgggacgtcatcgacggccatcgaatcatccgagacgagctcagcggattggttgagaacaacgggaccatcgacctgcatctgcgatgggcccaaatcgtcccgtggcccaccgccgttgcggtcaggggactcctcgggacgaacaacaccgagtaccatggcgccgctttccatcgcgggaagacttggatcttgcaggtgctactctaggaacaaacagcgca

SEQ ID NO: 4757 - DNA, 399 bp, Zea mays
gctctactgaggcacctgcatctaaggtgggtgatgctgaagcatcagaaacatcacaatctgcaggacatccttcaacagtggaagaaaaccagcaccatcaagttagcaaacattctggtcctagtgatgaagcagagccgaatcagcttagagagtctgttcgagacttacctgatggtagtgcatcttcttcgcctactaaaatacatcaatcaggtgacaccgaaacaggggaatctattcacacaggaaaggaagatacatctgataggaacatcttgcagtcacaaccagcagagtctgcgctagctagttcagatgatataacggaggctgaggacaatattgctcaagaatatgatgccccaaaagaacttagtggcccacaggagagta

SEQ ID NO: 4758 - DNA, 564 bp, Zea mays
tcgggtccggcctactctcccttagttgctatgtatttttcctgcatatgaattagattatttcatcgtagttatgatttaagtttttttccataaatgtagtagggtaattagaaataagtaaatagtcacgcgtagaaccaaaatacaaaatttttgcttggattctcttgcaggaaaaactactcacggtcaacaatctcgccaccagtgggtggcctcatcagccgtcttgtgccttctgcaacggaacccttgagactggtattcacctgtgtctacattgtcctttcgcccgtgcggtgcggagacaaatcctggcttgggaaggtgtaatcctccctgcccagtctgaccttgcttccgccaccaacattcgggaagtggtgggaagctgcgactcccccactaccaaaaaatcagaaacgcgctttcaatggaatcatgatttacacaatgtggaacctctggaaggagaggaatcgcaggattttcgaaagcgtcgcccttcctccggtccaagtcgccttaaaaattaaagaagatgtttcacaatttaggcgg

SEQ ID NO: 4759 - DNA, 369 bp, Zea mays
  misc_feature (57)..(60): n is a, c, g, or t
  misc_feature (62)..(63): n is a, c, g, or t
taggattggatcggattaggatcgggtcctattactattcatttttgaactaaaatnnnntnnagggccctaccattttgtgaagaagcatttggatcgtgatccattaccacccctagttctatatcatctaacttctgtgatcctaaattaatgacaaagttggaccttagccataacaatttctaagggagcatacatgttccctaaatcttactttgaactcatctcgctaaatctttcatcaaacaaatttagtggcgaaattcctaaaactttatgaagacttgaacaactaaaggacattcaaatggaccacaacattcttactagaaacattccgtccacattcagcagtctacacagctt

SEQ ID NO: 4760 - DNA, 472 bp, Zea mays
  misc_feature (397)..(401): n is a, c, g, or t
  misc_feature (409)..(413): n is a, c, g, or t
  misc_feature (416)..(421): n is a, c, g, or t
  misc_feature (426)..(426): n is a, c, g, or t
  misc_feature (428)..(434): n is a, c, g, or t
  misc_feature (461)..(461): n is a, c, g, or t
  misc_feature (463)..(463): n is a, c, g, or t
  misc_feature (465)..(468): n is a, c, g, or t
ctcttcggcgcggcggtgaactctcagatcacgctcagcatgccgccgcatctcgtggtcaccaaggtagcgatgtgggctaccgtgctcacccccgttaccaagtacgcgcttgagttcgcgccgtttgccatccagctccagcaccacctcccagagagaatgggacctcgcgcgcgcatgttcgtccgaggtggagtcgggtcggcggcgctccttgtaatcctggcgctcgccctctgcgtgccgtacttccagtacgtgctcagcctcacaggctcgctagtgagcgtggcgatcagcgtcatctttccctgcgcgttctacctcaagatctactggggtagagtgcccatgtccaccgtcactatcaacgtggtgttgattatgttcgatnnnnngtggcatnnnnngannnnnncgggncnnnnnnngcttcttttgttgggggggggggcttncntnnnngtga

SEQ ID NO: 4761 - DNA, 1556 bp, Zea mays
  misc_feature (62)..(67): n is a, c, g, or t
  misc_feature (365)..(365): n is a, c, g, or t
  misc_feature (373)..(374): n is a, c, g, or t
  misc_feature (376)..(378): n is a, c, g, or t
  misc_feature (383)..(398): n is a, c, g, or t
  misc_feature (403)..(404): n is a, c, g, or t
  misc_feature (408)..(408): n is a, c, g, or t
  misc_feature (410)..(431): n is a, c, g, or t
  misc_feature (436)..(446): n is a, c, g, or t
  misc_feature (448)..(449): n is a, c, g, or t
  misc_feature (451)..(456): n is a, c, g, or t
  misc_feature (462)..(462): n is a, c, g, or t
  misc_feature (466)..(470): n is a, c, g, or t
  misc_feature (472)..(475): n is a, c, g, or t
  misc_feature (477)..(483): n is a, c, g, or t
  misc_feature (488)..(491): n is a, c, g, or t
  misc_feature (494)..(501): n is a, c, g, or t
  misc_feature (503)..(523): n is a, c, g, or t
  misc_feature (529)..(545): n is a, c, g, or t
  misc_feature (547)..(552): n is a, c, g, or t
  misc_feature (554)..(564): n is a, c, g, or t
  misc_feature (568)..(569): n is a, c, g, or t
  misc_feature (571)..(586): n is a, c, g, or t
  misc_feature (588)..(591): n is a, c, g, or t
  misc_feature (593)..(593): n is a, c, g, or t
  misc_feature (595)..(600): n is a, c, g, or t
  misc_feature (608)..(609): n is a, c, g, or t
  misc_feature (616)..(620): n is a, c, g, or t
  misc_feature (622)..(629): n is a, c, g, or t
  misc_feature (631)..(631): n is a, c, g, or t
  misc_feature (633)..(642): n is a, c, g, or t
  misc_feature (647)..(656): n is a, c, g, or t
  misc_feature (661)..(662): n is a, c, g, or t
  misc_feature (664)..(672): n is a, c, g, or t
  misc_feature (683)..(687): n is a, c, g, or t
  misc_feature (690)..(692): n is a, c, g, or t
  misc_feature (694)..(695): n is a, c, g, or t
  misc_feature (697)..(699): n is a, c, g, or t
  misc_feature (704)..(715): n is a, c, g, or t
  misc_feature (717)..(717): n is a, c, g, or t
  misc_feature (719)..(731): n is a, c, g, or t
  misc_feature (733)..(734): n is a, c, g, or t
  misc_feature (736)..(745): n is a, c, g, or t
  misc_feature (748)..(751): n is a, c, g, or t
  misc_feature (755)..(756): n is a, c, g, or t
  misc_feature (759)..(770): n is a, c, g, or t
  misc_feature (772)..(777): n is a, c, g, or t
  misc_feature (784)..(787): n is a, c, g, or t
  misc_feature (790)..(790): n is a, c, g, or t
  misc_feature (794)..(801): n is a, c, g, or t
  misc_feature (805)..(818): n is a, c, g, or t
  misc_feature (821)..(840): n is a, c, g, or t
  misc_feature (842)..(848): n is a, c, g, or t
  misc_feature (850)..(861): n is a, c, g, or t
  misc_feature (863)..(865): n is a, c, g, or t
  misc_feature (870)..(879): n is a, c, g, or t
  misc_feature (883)..(901): n is a, c, g, or t
  misc_feature (904)..(907): n is a, c, g, or t
  misc_feature (909)..(922): n is a, c, g, or t
  misc_feature (925)..(930): n is a, c, g, or t
  misc_feature (932)..(940): n is a, c, g, or t
  misc_feature (943)..(944): n is a, c, g, or t
  misc_feature (949)..(967): n is a, c, g, or t
  misc_feature (969)..(981): n is a, c, g, or t
  misc_feature (983)..(997): n is a, c, g, or t
  misc_feature (1000)..(1006): n is a, c, g, or t
  misc_feature (1009)..(1023): n is a, c, g, or t
  misc_feature (1025)..(1029): n is a, c, g, or t
  misc_feature (1031)..(1049): n is a, c, g, or t
  misc_feature (1051)..(1069): n is a, c, g, or t
  misc_feature (1071)..(1075): n is a, c, g, or t
  misc_feature (1077)..(1088): n is a, c, g, or t
  misc_feature (1090)..(1105): n is a, c, g, or t
  misc_feature (1107)..(1134): n is a, c, g, or t
  misc_feature (1136)..(1144): n is a, c, g, or t
  misc_feature (1146)..(1168): n is a, c, g, or t
  misc_feature (1170)..(1176): n is a, c, g, or t
  misc_feature (1178)..(1208): n is a, c, g, or t
  misc_feature (1211)..(1216): n is a, c, g, or t
  misc_feature (1218)..(1306): n is a, c, g, or t
  misc_feature (1311)..(1318): n is a, c, g, or t
  misc_feature (1324)..(1348): n is a, c, g, or t
  misc_feature (1350)..(1373): n is a, c, g, or t
  misc_feature (1375)..(1384): n is a, c, g, or t
  misc_feature (1386)..(1392): n is a, c, g, or t
  misc_feature (1394)..(1400): n is a, c, g, or t
  misc_feature (1402)..(1405): n is a, c, g, or t
  misc_feature (1407)..(1433): n is a, c, g, or t
  misc_feature (1437)..(1455): n is a, c, g, or t
  misc_feature (1457)..(1463): n is a, c, g, or t
  misc_feature (1465)..(1469): n is a, c, g, or t
  misc_feature (1471)..(1479): n is a, c, g, or t
  misc_feature (1482)..(1537): n is a, c, g, or t
  misc_feature (1540)..(1553): n is a, c, g, or t
cggttcgtggcaacttcgccagtgcttaccagcagcacggtgtggaggcccacctccatgcnnnnnngcaggagcccgaggagaccctccgaaagttcatctcccgcttcactaaggtgcgaggtacgatacctcgtatttctgatgcttctatcatcacggccttccgacagggggtacgagatgaaaaaatgttggagaagttggccacatatgacgtggaaactgtccccacgctcttcgctctggccgacaagtgcaccagagccgccaagggccatgcatggcactcggccccacaaactggagctgcccagtcgggtggctcgggggccgtcccccgggacagaaagaaaaagaaaaanaaaaaaannannntattnnnnnnnnnnnnnnnntgtanntgtngnnnnnnnnnnnnnnnnnnnnnnatggnnnnnnnnnnntnnannnnnnattttntttnnnnnannnngnnnnnnnatttnnnngtnnnnnnnntnnnnnnnnnnnnnnnnnnnnnattttnnnnnnnnnnnnnnnnnannnnnnannnnnnnnnnntatnnannnnnnnnnnnnnnnntnnnngngnnnnnntttgtttnntatttannnnnannnnnnnnanannnnnnnnnnagaannnnnnnnnntatgnngnnnnnnnnnattaagattannnnnggnnngnntnnnatatnnnnnnnnnnnnanannnnnnnnnnnnngnntnnnnnnnnnnttnnnntatnnttnnnnnnnnnnnnannnnnntaaaaannnngtntaannnnnnnntttnnnnnnnnnnnnnntannnnnnnnnnnnnnnnnnnntnnnnnnnannnnnnnnnnnnannnataannnnnnnnnngagnnnnnnnnnnnnnnnnnnnttnnnnannnnnnnnnnnnnnaannnnnnannnnnnnnnaannaatannnnnnnnnnnnnnnnnnnannnnnnnnnnnnnannnnnnnnnnnnnnntgnnnnnnnatnnnnnnnnnnnnnnnannnnnannnnnnnnnnnnnnnnnnntnnnnnnnnnnnnnnnnnnntnnnnnannnnnnnnnnnntnnnnnnnnnnnnnnnnannnnnnnnnnnnnnnnnnnnnnnnnnnntnnnnnnnnntnnnnnnnnnnnnnnnnnnnnnnnannnnnnnannnnnnnnnnnnnnnnnnnnnnnnnnnnnnnttnnnnnnannnnnnnnnnnnnnnnnnnnnnnnnnnnnnnnnnnnnnnnnnnnnnnnnnnnnnnnnnnnnnnnnnnnnnnnnnnnnnnnnnnnnnnnnaaatnnnnnnnnataaannnnnnnnnnnnnnnnnnnnnnnnngnnnnnnnnnnnnnnnnnnnnnnnntnnnnnnnnnntnnnnnnnannnnnnntnnnnannnnnnnnnnnnnnnnnnnnnnnnnnntatnnnnnnnnnnnnnnnnnnnannnnnnnannnnngnnnnnnnnnaannnnnnnnnnnnnnnnnnnnnnnnnnnnnnnnnnnnnnnnnnnnnnnnnnnnnnnnttnnnnnnnnnnnnnnttt

SEQ ID NO: 4762 - DNA, 406 bp, Zea mays
tgttctgtgaatgcattttcgtcgtgcttcaacaacagggaccggactacatggtccgcaacgcaaggaggtccatgctggaggagctggaggggatgctggagatcgtggagcctcagccgccggggaagccgaggacgcttagccgcaggaggttcgatctcccagaaggcggagccatcgaaaaggagacgcgggaggcgggcaagtgaagtgcatcggtgggtggtggcatgcttgggcagtttggtatatgcgcgatgcggactatagagtttgagtttgtgctgctaccgaaccgtggaccaccttaccccgttgagatgtttgatagctggactttttgtgctgttgtatttgtagaccagaacgttgttctttgtaataaattggcgtgtgctgaggg

SEQ ID NO: 4763 - DNA, 392 bp, Zea mays
cagactggcgccattggtgatcatccagccgagcgccaggctcgcgaagaagttgtcctgcaacttctccgtcagcagcaccggcttcaaggagtcgtacatgccgaagtagaggccgcgatacacgacgatcccggccacggagacgttgaacccgcggtagagccccacgacgccgtcggaccggagcgtcttccggtacacgtcgacgaggccagtgaactgcctctcgccgcccttagccgccgccctgtagtcgctggtgaggcgcgtcctggcgtagtcgagggagtagacgaagagcagcgacgtggccccggcggcgctgccggaggcgatgttccccgcgaaccacttccagtagccgtccctgtccttgttgaagttgaaga

SEQ ID NO: 4764 - DNA, 669 bp, Zea mays
  misc_feature (562)..(562): n is a, c, g, or t
  misc_feature (572)..(573): n is a, c, g, or t
  misc_feature (580)..(581): n is a, c, g, or t
  misc_feature (593)..(593): n is a, c, g, or t
  misc_feature (596)..(597): n is a, c, g, or t
  misc_feature (599)..(599): n is a, c, g, or t
  misc_feature (601)..(601): n is a, c, g, or t
  misc_feature (612)..(612): n is a, c, g, or t
  misc_feature (620)..(622): n is a, c, g, or t
  misc_feature (632)..(639): n is a, c, g, or t
  misc_feature (643)..(645): n is a, c, g, or t
  misc_feature (658)..(663): n is a, c, g, or t
tttgttggcaccacacttttaatctttcttgcactggtacactacttctaagttctaacaatggaatatggatgatgttttttggtatttttcttgcactggtacactacttcaaacctgaatgaatatgaatgttgtatttttcttttaatattagaagtacttgtttttcttgataaggactaaaaatacttgtatctgggtgaacctctgactgtattatcatcatgataacccacaacttttcctagggtctgcatgaaatttatcacaagcagatgaatttcaagagacgatacactggcttgatgttaaaaataaaatgacatctataagggccgtgacttgtgattcttaccatgatttattgaggataacatgggttgtctcttatcagtctggagtaaagaagcactaatagactaactggtgcaggcaggggttgtatctaactcatcagatctgtttattttgttttgttgactatcgaactatcagaatgaaaagaaatcctgattggacttaacaatctgcagattccaacattctccgagaatacagnatgacatcanncacaganngcattgacgcgntcnngncnactcgggttgntgtcactnnngatgtgagcnnnnnnnncaannntgccctgactggnnnnnntttcta

SEQ ID NO: 4765 - DNA, 548 bp, Zea mays
  misc_feature (364)..(364): n is a, c, g, or t
  misc_feature (384)..(390): n is a, c, g, or t
  misc_feature (395)..(402): n is a, c, g, or t
  misc_feature (405)..(406): n is a, c, g, or t
  misc_feature (417)..(418): n is a, c, g, or t
  misc_feature (439)..(439): n is a, c, g, or t
gattggggcttcccgtccataagcacaaagatagaaccactggaaaggggtgtacaggtaggaaagtacgcaccgatatctagttcgatatggtgcaacaaggtcatcacgacgtccttcatcagttagtgctcatggatccttacattgacaagcacctagaagagatccgcgtcgctaaggacagaactcgcatggaggcatgggtccagaaacaacacaagatcagtttcacggcgtggctaaaggagcaaaacattccaagtggaggatcagatgatgagtccaccaccgccgtgaggcttgcgtccggcccgtccacccaaatcactatgtggctagggtacgacttcaatggataaancccaacgcacatgtccctgnnnnnnncgaannnnnnnnacnnttttctctcgnnaatctgtgcaggcatgtaggngacgttcattaagaaaagtgaacgatctgcaaataatgatgataagtttactaacttatatatgaagcatttagatgatgacataacagaggaacttgttaaattgaag

SEQ ID NO: 4766 - DNA, 558 bp, Zea mays
gatgcccggagaagtggcgttggtaacatttttgttaaggtatagttgcaatatcctcacaacacacaatcatatatctcctccatgtgtataactatatatatattattcataagtactaatttgttgtcttgtatgaaattcacagaaccttagtagttctgttgacaatgccagccttcaagaattgttctccaagtttggagacgttttgtcatgcaaagttgcaaaaaatgaggatgggaccagtagaggatatgggtttgttcaatttacatcacaggagtcagcagatgaagcaattgggaacctcaatggctcccttttcaatgacagaaaattgtatgttcatgccatttgtattaattataattatttataatatgttttacatatataattttctcgacaaactgtgcaggcatgtagctacgttcattaagaaaagtgaacgatctgcaaataatgatgataagtttactaacttatatatgaagcatctagatgatgacataacagaggaacttgttaaattgaagttctctcagtttggttcga

SEQ ID NO: 4767 - DNA, 432 bp, Zea mays
  misc_feature (377)..(377): n is a, c, g, or t
  misc_feature (386)..(386): n is a, c, g, or t
  misc_feature (411)..(413): n is a, c, g, or t
  misc_feature (421)..(422): n is a, c, g, or t
  misc_feature (424)..(424): n is a, c, g, or t
cgctactacatattcttgttcctccaatccatcgctttcttcatcgtcggcattggctatgtcggaacattcgtccctcactagctagctcgtagcagaatcattctgagaggctacccatcctgatgatgcatggttgtcttcaaccccttccggtttcatttcatggaaatcagttggtagataagatcgagcaaaccttctcttgtatgtaatgttgtcatgggaaaaaaaagaaaatacagtgtaaaggcacactggcagacaagccatagatatgagtaggtatgtgtgttgttgaaggaatgtgctgtgatgcgcatgggggattggtgatgacaagcaggccgttttgagtctccatgtcacctatgcangaatcaggntgggggggttctcagaatgattgtnnnaggaggcnncnagtggggg

SEQ ID NO: 4768 - DNA, 412 bp, Zea mays
aggtaataatcttggacatggtagttggatacgggcagccaaacataaagcatctagagacacaagttatgtttgatttgtatattatgacggttaatggagctgagcgcgacgagcaagagtggaagaagattttcatagaagcaggattcaaagactacaaaatcctaccaatccttggtgcactatcagtcatcgaggtctatccatgaatgcttgctgagcaaaggcctccacaataaattgaagaatctgaaagtgcgcgctgatagtaatctatgaattgttctttttactgtatacagtttgaagcacatcgtcgtgtgtccttccacatgtgatacgatatgtaaacgatgtgctatatatattacccatgctcccgttcgatgtagatgctggggatcataga

SEQ ID NO: 4769 - DNA, 384 bp, Zea mays
cgatctcgacgccggaagtatgaggaggacgaggactacgaggaggaggttgacgaagacgacgaggtggaggaggagtaccatgatgaccttgaggaggtcgaggaggaggaagaagtggcaccacagcggccgaagagcattgtgaaatgcggtgcccgtggccggaatgtgaagctgtctctggcagcgaagcgatctcatcagcggaagcaggaggatgatgaggatatggattttgacccagagttggatgacgaggaggtcgagatagatgaggatattgattttgatcccgatgtcgatggtgacgaggaggatgagtatcaagacgaggaggaagaggaactggttcctgcccgtgccagaaaggtaactgtaaag

SEQ ID NO: 4770 - DNA, 949 bp, Zea mays
  misc_feature (913)..(915): n is a, c, g, or t
aggtgggtgtgggttatatgcatcgtttggttgatataatcatggaattcattattatttcgatagtgttccattggattcatgtcatttgtaagcccaacgtccaaaagagtttgttcagtttctgaacaaaatttgcaataagattacatacaagtcaaacatagagaaatatttcctgtattttggtgtattaatgcataaccatgcacaccattagttctattcagaataggaagctgcgatgcaatcaactggcaacaattggaatctatgaggttaattttcatattgtgttatatgctttgtttgttaacggattcctttcataaaagactttaacgaggggctttgttatccttaaacgcaagcaagagagaaaaaaatcatccttgtctcacagaaagcgagctgtagctgtctggatacccttctcatgctattgcccttgaaattgttagccatttggaaatttgcacatcacgtactcatctctttttcttcaggtggagatgtggtcgttctatatgcctctatctacaaggatgtccccatggtggttaacctctctggccggtttcatttggagaaaggcattgaggagcgcctaggcaaagagtttatggatagaataaacaaggaaggctacatcgatgtcaaagacaaatcaggtatgggaacatgtctgacctacattgaacgctacgctacacaaaccatatcttctgcctgtgatttatttgcttttcatgtgcatctaataactgcttacctgttgcgatgtaggaaaggttttgtatagagtaaccaaggagagcttgatggaacggctgagccatgatatgcacgcaatgagcctttccatcagcaaagagtgcaggttatcagcttatttaggcataattttcccttnnngctaattaacaacaatcgagcgcccaattatagc

SEQ ID NO: 4771 - DNA, 546 bp, Zea mays
  misc_feature (412)..(414): n is a, c, g, or t
gatcgacctgcccttctcctgccgtgcggggtcctgctcctcctgcgccggcaaggtcgtctctggctccgtcgaccagtccgaccagagcttcctcaacgacaaccaggtcgccgacggttgggtgctcacctgcgctgcgtaccccacctccgacgtcgtcatcgagacgcacaaggaggatgacctcctataattctagctagctacacaccgccagggcccgtcgtcttgtgcaaccacatgcagtaccgcccgcgcaggagatcgatgagacgtgtcgtctcaataattctagctatatatatatatatgcatgcatgcatgcatgtatgtacttttctctgttccaaactgagtatattctaaattacaagatttaatcacaaggtttagagcaactccaaccatnnncgacaaactgtgcaggcatgtagctacgttcattaagaaaagtgaacgatctgcaaataatgatgataagtttactaacttatatatgaagcatctagatgatgacataacagaggaacttgttaaattgaa

SEQ ID NO: 4772 - DNA, 402 bp, Zea mays
taggcgcccagatttgaagccatggccacgacgacgaccaagtgatgacgacctagcagcgactcagcgagagcctaaataaatattaattcacagtcgtcaagttaatcttgtggttatacggtacgggcggggcttgtacttatgtaggttgctaagtcttaagtgtgtagtttaattaacgtgtgtgtggaatgtacgcgtcatacaaatgtgttggtgtgtgccctgccgcaagattgcggtgagcggtggatctatggtcaacgggtgcctaaatgatttgtgcttttgtagcataaaatggcacatctcctctgcttttgttacatctccaccttttctttttgcacttttcacctcaagtaaaacatgtggcggctttcactaagtacaaagaaa

SEQ ID NO: 4773 - DNA, 1416 bp, Zea mays
  misc_feature (779)..(789): n is a, c, g, or t
  misc_feature (792)..(806): n is a, c, g, or t
  misc_feature (808)..(836): n is a, c, g, or t
  misc_feature (838)..(845): n is a, c, g, or t
  misc_feature (847)..(854): n is a, c, g, or t
  misc_feature (857)..(864): n is a, c, g, or t
  misc_feature (873)..(874): n is a, c, g, or t
  misc_feature (878)..(881): n is a, c, g, or t
  misc_feature (885)..(887): n is a, c, g, or t
  misc_feature (891)..(899): n is a, c, g, or t
  misc_feature (901)..(905): n is a, c, g, or t
  misc_feature (907)..(912): n is a, c, g, or t
  misc_feature (916)..(920): n is a, c, g, or t
  misc_feature (922)..(926): n is a, c, g, or t
  misc_feature (930)..(930): n is a, c, g, or t
  misc_feature (939)..(946): n is a, c, g, or t
  misc_feature (950)..(952): n is a, c, g, or t
  misc_feature (960)..(963): n is a, c, g, or t
  misc_feature (965)..(967): n is a, c, g, or t
  misc_feature (969)..(972): n is a, c, g, or t
  misc_feature (975)..(979): n is a, c, g, or t
  misc_feature (981)..(991): n is a, c, g, or t
  misc_feature (994)..(996): n is a, c, g, or t
  misc_feature (998)..(998): n is a, c, g, or t
  misc_feature (1000)..(1000): n is a, c, g, or t
  misc_feature (1009)..(1013): n is a, c, g, or t
  misc_feature (1015)..(1028): n is a, c, g, or t
  misc_feature (1033)..(1048): n is a, c, g, or t
  misc_feature (1050)..(1059): n is a, c, g, or t
  misc_feature (1061)..(1068): n is a, c, g, or t
  misc_feature (1070)..(1070): n is a, c, g, or t
  misc_feature (1072)..(1072): n is a, c, g, or t
  misc_feature (1074)..(1076): n is a, c, g, or t
  misc_feature (1086)..(1088): n is a, c, g, or t
  misc_feature (1091)..(1098): n is a, c, g, or t
  misc_feature (1101)..(1105): n is a, c, g, or t
  misc_feature (1108)..(1116): n is a, c, g, or t
  misc_feature (1118)..(1120): n is a, c, g, or t
  misc_feature (1122)..(1122): n is a, c, g, or t
  misc_feature (1124)..(1131): n is a, c, g, or t
  misc_feature (1133)..(1148): n is a, c, g, or t
  misc_feature (1153)..(1163): n is a, c, g, or t
  misc_feature (1165)..(1167): n is a, c, g, or t
  misc_feature (1169)..(1171): n is a, c, g, or t
  misc_feature (1176)..(1179): n is a, c, g, or t
  misc_feature (1181)..(1193): n is a, c, g, or t
  misc_feature (1195)..(1196): n is a, c, g, or t
  misc_feature (1198)..(1200): n is a, c, g, or t
  misc_feature (1207)..(1212): n is a, c, g, or t
  misc_feature (1214)..(1214): n is a, c, g, or t
  misc_feature (1217)..(1227): n is a, c, g, or t
  misc_feature (1232)..(1240): n is a, c, g, or t
  misc_feature (1244)..(1251): n is a, c, g, or t
  misc_feature (1253)..(1257): n is a, c, g, or t
  misc_feature (1261)..(1264): n is a, c, g, or t
  misc_feature (1272)..(1280): n is a, c, g, or t
  misc_feature (1285)..(1288): n is a, c, g, or t
  misc_feature (1290)..(1290): n is a, c, g, or t
  misc_feature (1292)..(1297): n is a, c, g, or t
  misc_feature (1303)..(1307): n is a, c, g, or t
  misc_feature (1317)..(1320): n is a, c, g, or t
  misc_feature (1325)..(1329): n is a, c, g, or t
  misc_feature (1332)..(1344): n is a, c, g, or t
  misc_feature (1346)..(1348): n is a, c, g, or t
  misc_feature (1351)..(1351): n is a, c, g, or t
  misc_feature (1358)..(1358): n is a, c, g, or t
  misc_feature (1360)..(1371): n is a, c, g, or t
  misc_feature (1374)..(1378): n is a, c, g, or t
  misc_feature (1380)..(1392): n is a, c, g, or t
  misc_feature (1398)..(1407): n is a, c, g, or t
  misc_feature (1409)..(1409): n is a, c, g, or t
  misc_feature (1411)..(1411): n is a, c, g, or t
ctgcataatcaaaatccacaagctacgtttcatgccgcatggctatcttatctacactacagtctacaggcagactatttgtcaatgctaagatttcacgtccccatacagaaaaaagtgaaaacactgctatcacctgggagctctgggtatcacgagacgtacttgatcagccactcgaggctctgcattaaacagattgtgtaggagaataaaggagtgtttgaatgcactagagctaatagttggttggctaaaaaattgttagtactaatcttagccactaaatattaactctagcgcattcaaacacctcctaaatgtaaagttaacagccttgcaaactgtagcatgcatgaatcatgattcatgcccaccagtgtattcccaaaaaagaagagaaaaagaagagaatgtgtaccattaggcattctggtagatcatcatcctgcgtcctgatgtgagtctacaaatatgtaaagagctactcaataggcgtttccagtctagctagaatctgagcatgtaaatttggagtatggtatctgttttgatggaagttacagttcatactttgacttaggtatgcctaccaagttctgacaataacaaatgtaacaaaaattatagctagaaatggaggacctgggtgttcacctccgtcaccaaatggcatgaggactccttgtttgtggcaaggcaagcaagaactaccactgcagctgccacagtcgagggccagaaggagagctgctcatggttccgaagtgagatgaagnnnnnnnnnnnttnnnnnnnnnnnnnnncnnnnnnnnnnnnnnnnnnnnnnnnnnnnntnnnnnnnncnnnnnnnnacnnnnnnnnctctctcannctcnnnnatcnnntacnnnnnnnnntnnnnntnnnnnncccnnnnncnnnnnctcnctctccaannnnnnnncccnnnctcccatnnnnannncnnnnatnnnnncnnnnnnnnnnncannnantnccccctacnnnnntnnnnnnnnnnnnnncactnnnnnnnnnnnnnnnnannnnnnnnnntnnnnnnnncnancnnnccacttacannntcnnnnnnnnccnnnnncannnnnnnnncnnncncnnnnnnnncnnnnnnnnnnnnnnnnccccnnnnnnnnnnncnnncnnnccctnnnncnnnnnnnnnnnnntnncnnncctcccnnnnnncntcnnnnnnnnnnncatcnnnnnnnnncccnnnnnnnnannnnnttcnnnnactcccannnnnnnnnattannnntncnnnnnnatttcnnnnnctttatacannnnaaaannnnnaannnnnnnnnnnnnannnctntactccntnnnnnnnnnnnnccnnnnncnnnnnnnnnnnnnacatcnnnnnnnnnncnanccata

SEQ ID NO: 4774 - DNA, 378 bp, Zea mays
gccggtacgtggcgtcgtggcatttgccaccattgttcccagcaagcacacacgcgccgtacctactcactctgcagtgaaaggagagaggaaaagggacggtgatgtacaggctctctctctcctccctgtctggcacacaaaggacaagaacacagaacgcaaccaaggctactccatgtctccatctccatgaccatgagagaggtgcaaacatcaccgcagcactgttccttctactacagcaacagttaggctggccctcttcggctcctccccaataaatcgtcctctggctcaacctctccttttacagaattacagactgccaggggcataaagaactcttgagtctataccactcaaggcccagacaaa

SEQ ID NO: 4775 - DNA, 366 bp, Zea mays
atccccacactgtgactggctgatcatatccacacaccacacaaggacgcctccaaacctgtttgttgtgtttcatcatcaatttctactctcctttccacaatacaaatgccatccacggccatagttggtttcgaattacatgcatacatacattacacacggcctcactcatcaaaacaaaacaataaaataaataaacaaataaataaatagtttcaagaactgcagctacgtctatgtgcgtggccacctttgcacgacactgacccggtcacaaacgcacgcacgcactctgcgtgcgctctgctggcggctgctgccctgcccactcaaaattgtgctgctatatgttggcaaggtcta

SEQ ID NO: 4776 - DNA, 406 bp, Zea mays
  misc_feature (395)..(397): n is a, c, g, or t
ctagagaaaagtgatagagtatctggggatttgagaattaaatcatgtcgatggttcggcagtatagaggacctgtaatcatcaggaagcccaagttcccttcttatgagccataacgcgtgcatgttcagagttccatccacagagagcatgagaagtttcttcagccgctgaactacgccgacctcattctccctgaccacagcgtcttcctctgcgatcaagtcggacatcttctgcgtgaccttgcagcagtggttcctcttgacagggtgcacgtaggtctgaaacacgtgggggtatttcttgaggaaagcaccgacctcaatgttcagcccgacctcatgcctccaccttgagaggagctggagagacgcgtatccgttcctctgctnnnatatcacaa

SEQ ID NO: 4777 - DNA, 622 bp, Zea mays
  misc_feature (397)..(404): n is a, c, g, or t
  misc_feature (407)..(409): n is a, c, g, or t
  misc_feature (431)..(433): n is a, c, g, or t
  misc_feature (576)..(576): n is a, c, g, or t
  misc_feature (595)..(595): n is a, c, g, or t
  misc_feature (597)..(600): n is a, c, g, or t
aagcggtgtggagctgttgttgcctgcttagctcgaagagtaacaccagctggaacctctactagcgttgggacatcgaaagtgaccccctttccacccgtggtgagtgatcaagttggtacagagggcgctcctcgacttcaacgcagccgtgctgtgtccagggaccttgttagagattggaacttcgacgaagtaatcgtcgcaaattagagtagctctcaacagtcgtcagctggactctgtgctctacttatcagggaggagattccttcattcgatgtaaaattttcatagtagacgtctggaagtccatgttactatatgtcaatacttgatcacttgatgaggaaatgctcgagagggatggtacctttcaggagcaatattttggacnnnnnnnngtnnnatccctctcgagcatttctcannngtgatcaagtattgacatggacttcagacgtctactatgaaaattttaatcgaatgaaggaatctctcctgataagtagagcaagagtcagctgagactgttgagggctactctaatttgcacgattacttctcaagttcagntctaacaggtcctggacangnnnngtgcgttgaagtcgaggagcgc

SEQ ID NO: 4778 - DNA, 535 bp, Zea mays
cggcggcgctggccggcgacgccaggaaagggagcggcggcggccgagggagtccgtccagcttgtacttccccaatggcttcgcatgagtatttaatctccttcatcaagcaagagcaatgcattttcgtttctctctacatatatccatccaaagatgatccttttctctacctcgcgctagctctttcaacactctccgttggattggatctttaatttgcattgtgatgtgaggacgatggtcgtgtagctagctatagcttgctactgttcaacgagctaggagagagagagagagagatgagctagcagtagtagcactgcaaggatttcatgatattttatgtggattaattgttcgatgcacatcacaatgcaaattaaagatccaatccaacggagagtgttgaaagagctagcgcgaggtagagaaaaggatcatctttggatggatatatgtagagagaaacgaaaaggcattgctcttgcttgatgaaggagattaaatactcgtgcgaagccgttggggaag

SEQ ID NO: 4779 - DNA, 404 bp, Zea mays
  misc_feature (372)..(373): n is a, c, g, or t
  misc_feature (397)..(398): n is a, c, g, or t
ctacaatacccttgttgatgcatgcttcaagtgtcagcgctcttctgatgcactgaatctgctcgaggaaatgcgtgagaaaggggtgaagtcaagtttggtcacacataacattattgtgaagggcctttgcagggaggggcaattggaagaggcgttggggcgtctggaaatgatgacagaggagggattgacaccggatgtgattacatacaatacattgattgatgcatcctgcaaagccggaaatgttgccaaagcatttgtgttgatggatgagatggtgagaagtggactcaaaatggacactttcaccctaaacactttgctatataacctatgcaaagagaaacgttacgaagaggctgaaanntgttgaatgcatgcatcagggtgnngttggt

SEQ ID NO: 4780 - DNA, 369 bp, Zea mays
ccttcctctgctgtatccaggaatcctgtctccggaggttcgggttttcttttgtcatcaaatactatttcatatgactgatcgctttcgctggcagtttctttccggtcgtcagaactgtgctcaagtgaatgatcaaccataccaacaaattcctgctccgatggctccggacttctcttggctgggccagcagcttgatccgatggtacggcggctaattgtctcgcagagactgcctctggacttctttgcgcatcagaagcagcttcacctcccgagtgatcatttagagcgatgatctccttctccgaatgatccatacagttgtcagcaacaggagctagatcatagactggcgcagattct

SEQ ID NO: 4781 - DNA, 434 bp, Zea mays
caaggatgtcaatgtagtggtctggcgggttgacacggtcggggacatggatcccgagagtcgtcgtgaagtactcctcgaccgtctttacggggccgttgtagaccaccaagcctcctttcgcgagcagcatcagatcgtcgaacatgttgtacaacgtgtagctgggttggtggacgacagcacagacattgacgccttccagcgcctcgtgccggagagctctgaggaggagctgcgacgaggagctgtccaggccagacgttggctcgtccaggattagaagggatggctccatcaccatctcgatgcccacgttgacgcgcttcctctgcccgccagaaatcccgcgcttttccacggttcccaccaacgagctcctggtcccctgaaggtccagagagtcgattactctctccactaccagcaccttg

SEQ ID NO: 4782 - DNA, 1224 bp, Zea mays
  misc_feature (675)..(675): n is a, c, g, or t
  misc_feature (703)..(704): n is a, c, g, or t
  misc_feature (706)..(706): n is a, c, g, or t
  misc_feature (708)..(708): n is a, c, g, or t
  misc_feature (716)..(717): n is a, c, g, or t
  misc_feature (719)..(727): n is a, c, g, or t
  misc_feature (733)..(733): n is a, c, g, or t
  misc_feature (736)..(737): n is a, c, g, or t
  misc_feature (740)..(740): n is a, c, g, or t
  misc_feature (742)..(742): n is a, c, g, or t
  misc_feature (744)..(745): n is a, c, g, or t
  misc_feature (748)..(750): n is a, c, g, or t
  misc_feature (753)..(755): n is a, c, g, or t
  misc_feature (775)..(784): n is a, c, g, or t
  misc_feature (786)..(790): n is a, c, g, or t
  misc_feature (793)..(799): n is a, c, g, or t
  misc_feature (804)..(804): n is a, c, g, or t
  misc_feature (811)..(811): n is a, c, g, or t
  misc_feature (814)..(816): n is a, c, g, or t
  misc_feature (818)..(819): n is a, c, g, or t
  misc_feature (821)..(822): n is a, c, g, or t
  misc_feature (824)..(830): n is a, c, g, or t
  misc_feature (832)..(832): n is a, c, g, or t
  misc_feature (834)..(835): n is a, c, g, or t
  misc_feature (837)..(837): n is a, c, g, or t
  misc_feature (839)..(840): n is a, c, g, or t
  misc_feature (842)..(842): n is a, c, g, or t
  misc_feature (845)..(845): n is a, c, g, or t
  misc_feature (848)..(851): n is a, c, g, or t
  misc_feature (854)..(865): n is a, c, g, or t
  misc_feature (868)..(872): n is a, c, g, or t
  misc_feature (875)..(882): n is a, c, g, or t
  misc_feature (884)..(891): n is a, c, g, or t
  misc_feature (895)..(923): n is a, c, g, or t
  misc_feature (925)..(928): n is a, c, g, or t
  misc_feature (931)..(933): n is a, c, g, or t
  misc_feature (935)..(940): n is a, c, g, or t
  misc_feature (942)..(942): n is a, c, g, or t
  misc_feature (945)..(948): n is a, c, g, or t
  misc_feature (950)..(950): n is a, c, g, or t
  misc_feature (952)..(952): n is a, c, g, or t
  misc_feature (959)..(968): n is a, c, g, or t
  misc_feature (976)..(982): n is a, c, g, or t
  misc_feature (988)..(993): n is a, c, g, or t
  misc_feature (995)..(999): n is a, c, g, or t
  misc_feature (1002)..(1004): n is a, c, g, or t
  misc_feature (1006)..(1008): n is a, c, g, or t
  misc_feature (1016)..(1016): n is a, c, g, or t
  misc_feature (1019)..(1019): n is a, c, g, or t
  misc_feature (1021)..(1021): n is a, c, g, or t
  misc_feature (1025)..(1028): n is a, c, g, or t
  misc_feature (1032)..(1044): n is a, c, g, or t
  misc_feature (1052)..(1055): n is a, c, g, or t
  misc_feature (1059)..(1061): n is a, c, g, or t
  misc_feature (1063)..(1063): n is a, c, g, or t
  misc_feature (1068)..(1073): n is a, c, g, or t
  misc_feature (1075)..(1082): n is a, c, g, or t
  misc_feature (1087)..(1091): n is a, c, g, or t
  misc_feature (1096)..(1096): n is a, c, g, or t
  misc_feature (1098)..(1101): n is a, c, g, or t
  misc_feature (1104)..(1108): n is a, c, g, or t
  misc_feature (1111)..(1111): n is a, c, g, or t
  misc_feature (1113)..(1115): n is a, c, g, or t
  misc_feature (1121)..(1121): n is a, c, g, or t
  misc_feature (1124)..(1128): n is a, c, g, or t
  misc_feature (1130)..(1134): n is a, c, g, or t
  misc_feature (1137)..(1142): n is a, c, g, or t
  misc_feature (1147)..(1152): n is a, c, g, or t
  misc_feature (1154)..(1165): n is a, c, g, or t
  misc_feature (1174)..(1174): n is a, c, g, or t
  misc_feature (1177)..(1178): n is a, c, g, or t
  misc_feature (1180)..(1182): n is a, c, g, or t
  misc_feature (1184)..(1185): n is a, c, g, or t
  misc_feature (1196)..(1205): n is a, c, g, or t
  misc_feature (1207)..(1218): n is a, c, g, or t
agctaaagaatggtggatggggtgagagtcatctttcttctacaaccaaggtaaccatttccggtatgcttttgcaacgtagatggactgcatctttcatcaagaaccaagctaaagaatgttttacagtaagcaacacatccagacaatggaagcatgctttgatcctgtttctgtttaaattatagacaaaaagtacagaaatctgcatgaattcgtaaccagatagtaattcattaggaacatgaagcattgagaggaaacaagtaacctggctcagccttatttagagaaagtgaaacaagcaataaagtaaataaactttacgttggaaaaaaaaaccgttgcaattgcatggcaagaagagcatgagtcatactcatacataatatgtttcaataattccatatgtacctcaataatggaacatgcaggctgaatatttgctggttggaaaacattatgcatcttttgctttcacaaagtttacagtgcacctgtattaatgctgaagatttttgtctcaaaatctgtcttgccttgccgcattttcaatccatgagactgagcacatattcaaattatgaacaggcatacacaaatctggataaggagaagtcacacatagtgaacactgcgtgggcaatgttggcgctcatgaaagctggacaggtnattacttgatttaacactaaaaaatatnnancngccaattnnannnnnnnnnatttancannaanananncannnaannngcttatctatttaaccttannnnnnnnnnannnnnatnnnnnnnttttntctaagntcnnngnngnnannnnnnncncnncncnntnccnaannnngcnnnnnnnnnnnntgnnnnnttnnnnnnnncnnnnnnnnaatnnnnnnnnnnnnnnnnnnnnnnnnnnnnnannnnggnnncnnnnnnanaannnnancntttttannnnnnnnnnttcccctnnnnnnnaaaaannnnnnannnnnaannnannnaaaaaaanagntncccnnnnaaannnnnnnnnnnnnctttttcnnnnaaannnanaaaannnnnntnnnnnnnnccaannnnnccccncnnnnaannnnnaanannnaaaaanaannnnncnnnnnggnnnnnngggcnnnnnnannnnnnnnnnnntgttccccncannannntnntaaaaaaaaannnnnnnnnnannnnnnnnnnnncttttt

SEQ ID NO: 4783 - DNA, 486 bp, Zea mays
gcaggctctccaagagttctcaggcaatgaggtctctggtacccaggtgtacaaccacttgaggaagtggaggcagaggtgggttaggatcactaagcttagagagctcagtggtgcactttgggatgaagataatttcatgatcacacttgaggatgagcactacaggggccatgtcaaggtatgccacattgactttaggtagtagtcaatgttatatctattttgctttcaatgcctgcattattttgttgtcagtgctgacttatgtattctaactatgcagacacaccctaaggatgctgacttcctaaacaaactaattgagaactaccagcagatgcagatcatctttggcaatggtctagcaacaggcaaatttgccatgggttcaaatgaggctcttggttcaccatctgactttgttgagggcgcactgctgggtgagggacacaagagtggactgaagacagaggatgtgtccaa

SEQ ID NO: 4784 - DNA, 367 bp, Zea mays
tggcttccttccgcgttcagcaccaacgcacatgctcttcaccgctgtccatgcatccttgacggtgttcttcgcgccaagcatctgccacatttccgggggcacagaccggagcagagcgctcatggcctccggtcttgccaccgcttcactccttcgccaccgggctcgatcgtctcccagatctccagagcctcgaaattgcattgcatgagcatcgcccactccgtataattggagcgggttagcattggccacatgagagaaccctcccgcacgccatgccctgaactgctcggctgttcggcgtcacctgccatcttcttcgtctccggtgaccagcgcgggggaggcgcttctttcttgg

SEQ ID NO: 4785 - DNA, 361 bp, Zea mays
gtcaggtcatctgctcccgtcacttccgcctgggaggacacacctggttcgtgaagtattaccccaatgggaacgccgccgacaacgtcaacttcatatcgttgtttctcactatgcatggtgcagtagccggcaaggcagtgaaggcgcaggtcaccatcagtttactcgaccaggacgggaagccggtgccgtcgtacaccaaagtcacaccattcgtggacttcgctgcgaaaggggactggggatacacagagttcatcgagaggaaagctctggaggaatccgagcatctcagggatgactccttcaccgtcaggtttgatgtgaccatcatgagcgacatccaaaccggtagaaa

SEQ ID NO: 4786 - DNA, 365 bp, Zea mays
tctctgtgcagtcccaagtggagtgcggggtcagggggtggtggtcgccgttagcggaagggtggcctcgtgtgtgggcgtggccagggcgacactccttcgccctctccctacaacccgtggaccggccacatctccatgtggcccggactatccccgggtggacctccacacccaccttggccctagcctgctcaattgacgctgcccaacccgagttatccttttggcccctttcccccgctcctctggcacctcatccaccgcaccactacttcccttgcctccactcgttccgtcctggaacccgtggtctggtggatgggatcgcagtctctggccaactccttcagtataatgaccca

SEQ ID NO: 4787 - DNA, 872 bp, Zea mays
aatggcggccagagggttacatttgccaggccagacggctactttgcattgtatcctacaaaagatgcattgccataagttcaattttattctgattttttcctggaaacttcatctattaaaatgatatagctcgtactatcatacctttttctgtttgttggtaaaattgatggcgagggatgggtatgtactaagcaaagaaactgtagttctcatcatgcgcataccattaattcttgcctgctcttgggtatatatttcattgtatacaattataggtcagtgttaggagatcactatatttgctttattgttggctccttgacctgatatactttagccacaacgtgccagctggaactcatctgattgaggtctcctcaattggttacttcttttccccagtaagtatttattccttgattttgtaagtatggtgaagggaaatgaatataggtaatttactccatatttcttgtaaatgataggtttgagtagatatcagtgcatggaatcttggttatattcaagcagcattgactgaaactagaagagttctaaatgagcttgtcctggaacctctaaaagaagagcagtactatgaggtaggtattgctaaatattttttgtatacttgtttcctcggagttctcacttctcactgctgactgattataaaatggttctatgcagataacccttttcatttattgattgtgggatgttttagttatcgttaaatgctgaaattacaattgcacttcaattacgtagtttttcttcagcatttgaaatgctaatactgattttgtttctatatatgcctaactaaatttactcttgtgatgaagatcctgaggagatgaagc

SEQ ID NO: 4788 - DNA, 413 bp, Zea mays
ccgatcatttctagaccgaggaggcgctcgactcggtgcaccgcctgctctggtggggctcgcctgcgttcaccgggaggatctgggcagcactactcccctcggtgatcttgctgccggggagtttgtgctctttgtctcctatctcttctgtggattggcattgccgatttcaccgttcttcctgctgctgctagaggagttcggactccaactccagcacctcacgccccactccatcctccaggtggccatctttgtccatttctatgagatgttcgtgggagtggtagcttgcacttccctttttcgccagttctttgtgctggtgaggtctaggaagggcaaagaccaccttggggcctactacttccagacaaggtcagatccaacagtgacctatattgtctccc

SEQ ID NO: 4789 - DNA, 403 bp, Zea mays
gaaagtatgattgcagacggtggtcaaaagagttttctgttttggctagaatgccttgcaaaactgaggaagaacgggtgatcagagaccggaaagcttttcttttacacaatctgtttgtagatacagcaatttttagagctgcgtcaacaataaggcgactcattgatcagtctatgaactcagttggttcacatagtggtacacatggttcaaacgtatttgaggaacgtataggggacatgaatataactgtgaagaaggatggtgctgatgctagtttaaaggtggaggacaaggttgatggtgttgccttctgtcaaacgggtgctatggatattgcacaaaggaatcttctgaaaggtttaacctctgatgaaaatgttgttgctaaggagatgcc

SEQ ID NO: 4790 - DNA, 511 bp, Zea mays
cgacctcgtcgccctccaaggtaacgaccgtcgactttgttatcaataataatctgaaacatatcagaaaataatctctctttgttacatatatactaactatatatgggttacacatactgacgatttcaacaaatttccctatttcaattcaggagcacacacttttggtaaagtacagtgtcaattcacacaagagaactgcacagctgggcagccagaggaaacactagaaaacctagaccaggtcacccccaacgtgtttgacaacaagtattacggtaacctcctgcatggcgccgcacagctaccgtccgaccaggtcatgctgtcggcggaccctgtcgcggagatgacgaccgctcccattgttcatcggtttgcaggcaaccaagaagacttctttagaaactttgccgcatctatggttaagatgggcaacataagcccgctaactaggaacgatggagagatacggaaattttgccgaaggattaatagcgaaggctat

SEQ ID NO: 4791 - DNA, 389 bp, Zea mays
  misc_feature (376)..(377): n is a, c, g, or t
  misc_feature (379)..(379): n is a, c, g, or t
actgacagagaagagtgacgtctacagcttcggtgttgtccttcttgagatcctcaccggccaagagcctctcaagttggatgggcctgagacgcaaagaagcttgtcgtcgaagttcttgtccgctatgaaggagaacaatcttgatgcgatcttgccgagccacgtcaacggacaagggagtgatgaactgatcagagggctcgcagagctagccaagcagtgcctggacatgtgtggcagcaacagaccgtccatgaaggaggtcgccgatgagcttggtaggttgaggaagctttcgctgcatccttgggtacagatcgatgcagacatgatagagactcaaagccttcttagtggaacaacggctgctagnntngaaatagaag

SEQ ID NO: 4792 - DNA, 648 bp, Zea mays
  misc_feature (420)..(426): n is a, c, g, or t
  misc_feature (435)..(442): n is a, c, g, or t
  misc_feature (450)..(452): n is a, c, g, or t
  misc_feature (454)..(456): n is a, c, g, or t
  misc_feature (458)..(458): n is a, c, g, or t
  misc_feature (460)..(464): n is a, c, g, or t
  misc_feature (487)..(487): n is a, c, g, or t
  misc_feature (511)..(511): n is a, c, g, or t
  misc_feature (515)..(518): n is a, c, g, or t
  misc_feature (522)..(627): n is a, c, g, or t
  misc_feature (629)..(645): n is a, c, g, or t
cgtcgcgctcgtggcggcgccgtccctccgggtggtggaactcaaggagggccgccgcaggaggaccgaagcgccgttcctcgccatgttcgtgatcaccctggccaccggagcctgcgccgtcgtcggcagcgtaggggccaagtccatcgggctctcgtctagagcacacatggtcagcctctacgtgctgctcgccctgcctctgctgatcccagtgtggctcagagtcagggagggcacggccaagatacgcgagagtatgtgggagaaccgggtccacgatcacgactccgacgggcccgagtccgagacggcggtacccgcgccggtgtcggtggtcgagattcaggcggaggacaagcaggaggaggcaggggcggagctccaacgacagaataatggtcaacaaaaaaatgnnnnnnngttgttctnnnnnnnngatcccannncnnntntnnnnnatattcaagcctcagggaggccnacagcacattagagatggaacgtntaannnnggannnnnnnnnnnnnnnnnnnnnnnnnnnnnnnnnnnnnnnnnnnnnnnnnnnnnnnnnnnnnnnnnnnnnnnnnnnnnnnnnnnnnnnnnnnnnnnnnnnnnnnnnncnnnnnnnnnnnnnnnnncca

SEQ ID NO: 4793 - DNA, 412 bp, Zea mays
ccaaattgaaaagacaaatggtctccaagagagacacttgacaacacttacatgtgctccccgatcaatgccgcccatcgccataatgtaaaatagattcaaccactaagacactcacctgtcatcggagcaacctctgttgccctggattacaatgacatcgtcatcaggagaggccttgtccagttgcttgcctctaaagtggaagaatgcaaaggagaggagcctgggagtgacagagcaggtgaaccagagactccaggtctcgaggccgggcgacacccagatgaagcggaggcgggtgcggaggtcaaggaagagcagccccgttcagcgcgggtgccaggactagtcgacgacgaggccgatcatgatagtggcctagatcgacaccacacagagtagcacgtcg

SEQ ID NO: 4794 - DNA, 768 bp, Zea mays
tattaccaggcaatttcatgctctattttatttgttaatgtattacatagcagtccttttattttttttggttcgtacaacaacatacagaccatcatagctaggttgtattttgtataggcctggatctactggaatcttccatccacccggtttcagaacctccacggtatagcaggcagtatacaggccgcaagatgcacaagtcccagtcttgtaagtagttggtcacatttctgatctctgaacttgcgaaaagattactttgatactgatctgaactcgttgcagccatttctactccagttcgtcggcagtctacgatgaggtaaacagatagtaactctcagatccctcttcacttttgtttgagtttgagggtcaaagccaatgtccaatggccaaagagatacactaacactagtgctggtatgcccggccgatctgctctgttgcaggcgtgaaccatctcctacacctaacgatcggtcgcggtcgttatcgccttctcgtaaagcacgagctaaatctccatctcctcgaatcgtgaacacaaatactgcaagaggtacgctgttctttctctgaccgagcagatgtttgagatgtgaagcttgcatagaaaggacattcattatcgccttcccctttttgctacacagaaacaagggcaggctccccgataccaagttccagcccgatggcacggtccgcctctacggttgcaagaagaccgccttcgaactcgaggcatttgagactagctcg

SEQ ID NO: 4795 - DNA, 416 bp, Zea mays
actcatgtgcttcgctgacaattctgaaggtgtcgagcaacaacatcacgggacccatcccggcgtctctgtcggcgtgccatgcgctgcggatgttcgacgctgcggacaacaagctgtccggtgccataccggccgccgtgctcggcaacctgacatcgctggagagcctgctgctaagcaacaacttcatctcgggctccctcccgagcacgatcacctcctgcaccagcctcaggatcgccgacctcagcagcaacaagatctccggcgtgctgccggcggacctctgctcggctggcgccgcgcttgaggagctccggatgccggacaacatggtcaccggcatcatcccaccgggtctttccaactgctcgcgcctgagggtgatcgacttcagcatcaactacctgaaa

SEQ ID NO: 4796 - DNA, 560 bp, Zea mays
tgattgggctaaaagtctgccggcgggtagcaacgataatgcacttgagaactctgatggttagtgaaaatgcttttctttctagtcaaagtcgtcaaccactgtagtgaaaaatgctttgtttcttatcccatccaacaacaacccacaggtgcaggagcaggagctcgtctggccaaggtgaacacagatgccgtttttgacggttcatctgagaccgtagttctgtaccctgaaaatggagggaacttgcactgctttacggcgctgaccccttgtgccgtgctggatgtgatgggccctccctacaaccgtgctcaaggaagggattgcgcgtattacagcgaatcgccctactcgtgtggtgagtttcttcttctgccaccggccaccagtgtttccttaacgctaggctgaggaataataatatgttgttatatgtgggggtttcagctggagatgcacaatattcttggctcaaagaggttcacagcacatttgagatggaaggcataaagatggagcccaacttcatcgtctaataattaagcaggcatggc

SEQ ID NO: 4797 - DNA, 439 bp, Zea mays
  misc_feature (405)..(408): n is a, c, g, or t
cggttcgaggagctcaacatggacctcttccgcaagtgcatggagcccgtggagaagtgcctccgcgacgccaagatggacaagagcagcgtgcacgacgtcgttctcgtgggcggctccactcgcatcccccgcgtgcagcagctgctccaggacttcttcaacggcaaggagctgtgcaagagcatcaacccagacgaggctgtcgcgtacggagcggccgtccaggccgccatcctcactggcgagggcaatgagaaggttcaggatctgctcctgctcgacgtctcgccgctctcgctcggcctggagacggccggaggcgtcatgactgtgctcatccccaggaacaccaccatcccgacaaagaaggagcaggtcttctccacgggttttgtgcttgtnnnngaggtccatgttgagctcctcgaacgggggg

SEQ ID NO: 4798 - DNA, 972 bp, Zea mays
acctgtgagttttaacgcctggatctatcccttcagattgaattgacagtttagtacatatttgcaaagaggtagataacgtcaagaccagtcgatttaaccatccttttcttgacacttacaggatcaggaaatggtcttctttttggcaatcactgaaaatactgacgtgatgaggagcagattgcatccctatggttgtattgtaatatatctacatcaacatggcaatacgtgtctggacatggatgctacagttacatgtaaatgcagagttgcacaggtagatggcaaccttttctcccctgagatgccaactctgactcctactgtatgtactaatcttaacgacagtatccaatcagtagtcagttccttaggatgtcataaggtactgtgcaaacatttttctcctctgaatactgttatactaaatcaatgagatgtttgcagtttgtttgtttgttttaaagttaaaaaaaggagcgttgaagtgtttgttgtcaactgaccaaaatacaaccaactggtcctgtctacagacggagattggagaacatgcatgcctatgcatcggaagtgtatatgcacatcatatatcaatcactcttgtctttctgcctgctcctttttccggggaccaacactcccaacattgagcttatctacttcccgtactagacaaaatgtaattgtaggttttagcaattatagataaaaaacaatgtttatgataccaaataaacactattaaattaatttagaactatagataccattttttttactgtcataaatacaataccatttattagaaacttaatcaaacatgagtcactctaacgagctgcatttttctaaggacagaggaagtatatatgttgctaacacccatagcttgtggaaaggtttggtcgacaggagcatgcatcttcacacgacgtggacagtggactacgggccgaggcagtg

SEQ ID NO: 4799 - DNA, 320 bp, Zea mays
atgaaaaacaaaaaaaaaggctaaaagaaagtctacatgtcgtatctagctgatgaggaaaaaaatgaagagcacaaaaggaatacactgcaacttgttcaggatgacattgcattactgaagacagatctcggcacgaaatctttggcgcaacttgttcaggatggcatcaaccagcagctttacccgggcacctggtaaggacagggagttgaaatttggaactaacatgccgctggagacgtgcttcaaccttctgccttgccgggagaaaccacctctaggagcaaggcataacgtagctcgcaggaaactataaa

SEQ ID NO: 4800 - DNA, 480 bp, Zea mays
gcggtggcgctcctggcgctgtcgtcgtgtggcgtggttgcctcggcggcggcgtggaggggcaagcctcagaagttgaagcccggggagaagccctccggcaaatccaagttcttcgccctcacccccggaatgttcggccacaagcgcgactaccaggccgcctgctccgacgagggtggcccggcatgctacgtgggttgcccaaaggattgccctaacaaatgcctcgtcttctgcgcctactgcctcagcttctgcagtatgttgttcattaatgtgtctcaacatgcatcatgcattatggatcacatctatatatcgatcagtatatatactaacgaacatgcgcatacccaaaccaaaccacaaccccggccgaccggccagtgtgtgatatcttccccggcacctcctgcggcgacccgcgcttcaccggcggcgacggcaacaccttctacttccatggaaacaaggaca

SEQ ID NO: 4801 - DNA, 727 bp, Zea mays
  misc_feature (368)..(368): n is a, c, g, or t
  misc_feature (375)..(379): n is a, c, g, or t
  misc_feature (387)..(389): n is a, c, g, or t
  misc_feature (393)..(393): n is a, c, g, or t
  misc_feature (412)..(421): n is a, c, g, or t
  misc_feature (423)..(427): n is a, c, g, or t
  misc_feature (432)..(436): n is a, c, g, or t
  misc_feature (438)..(440): n is a, c, g, or t
  misc_feature (442)..(442): n is a, c, g, or t
  misc_feature (444)..(447): n is a, c, g, or t
  misc_feature (449)..(451): n is a, c, g, or t
  misc_feature (453)..(459): n is a, c, g, or t
  misc_feature (462)..(476): n is a, c, g, or t
  misc_feature (480)..(480): n is a, c, g, or t
  misc_feature (483)..(486): n is a, c, g, or t
  misc_feature (488)..(492): n is a, c, g, or t
  misc_feature (497)..(515): n is a, c, g, or t
  misc_feature (518)..(528): n is a, c, g, or t
  misc_feature (530)..(530): n is a, c, g, or t
  misc_feature (533)..(539): n is a, c, g, or t
  misc_feature (541)..(555): n is a, c, g, or t
  misc_feature (557)..(594): n is a, c, g, or t
  misc_feature (597)..(608): n is a, c, g, or t
  misc_feature (614)..(617): n is a, c, g, or t
  misc_feature (620)..(629): n is a, c, g, or t
  misc_feature (631)..(639): n is a, c, g, or t
  misc_feature (646)..(651): n is a, c, g, or t
  misc_feature (653)..(656): n is a, c, g, or t
  misc_feature (659)..(665): n is a, c, g, or t
  misc_feature (670)..(670): n is a, c, g, or t
  misc_feature (674)..(679): n is a, c, g, or t
  misc_feature (682)..(692): n is a, c, g, or t
  misc_feature (694)..(698): n is a, c, g, or t
  misc_feature (702)..(709): n is a, c, g, or t
  misc_feature (713)..(719): n is a, c, g, or t
gagctgtcacctcgttcttccctgctcaacctcgtcaaaccccgaatcccggatgttaggcaaaaataagcgaggttcatgtgcatcgcttatcaaatgctcggtcgaagacttcaatcgaaggtcgtcgtcgttccgtgcgtcatcaagaaatcccaagaatcgggtgaagacgaagctagcagcacgatattccccaagcgctcgacaaattgcctggatcggaaaatcattaccgatcccgcggattcgagacagatattggagcagtgagctgttttgctatttttactgactagtttgataaatgaattggtaggtatgtatgtcgcgatgattatttcacttgtagctcacgaacgcaaaangggcgcnnnnngcgcactnnncccnactattttttgggactatnnnnnnnnnnannnnnctgannnnngnnngngnnnngnnntnnnnnnnatnnnnnnnnnnnnnnnacgnagnnnncnnnnntgatnnnnnnnnnnnnnnnnnnnacnnnnnnnnnnnantcnnnnnnncnnnnnnnnnnnnnnncnnnnnnnnnnnnnnnnnnnnnnnnnnnnnnnnnnnnnntcnnnnnnnnnnnntccatnnnngtnnnnnnnnnntnnnnnnnnntctttcnnnnnntnnnnttnnnnnnntttancatnnnnnnaannnnnnnnnnngnnnnncctnnnnnnnntacnnnnnnnttgagtag

SEQ ID NO: 4802 - DNA, 1348 bp, Zea mays
  misc_feature (62)..(63): n is a, c, g, or t
  misc_feature (356)..(357): n is a, c, g, or t
  misc_feature (359)..(359): n is a, c, g, or t
  misc_feature (361)..(361): n is a, c, g, or t
  misc_feature (478)..(480): n is a, c, g, or t
  misc_feature (573)..(581): n is a, c, g, or t
  misc_feature (584)..(587): n is a, c, g, or t
  misc_feature (589)..(606): n is a, c, g, or t
  misc_feature (609)..(624): n is a, c, g, or t
  misc_feature (627)..(634): n is a, c, g, or t
  misc_feature (639)..(642): n is a, c, g, or t
  misc_feature (644)..(645): n is a, c, g, or t
  misc_feature (647)..(649): n is a, c, g, or t
  misc_feature (654)..(663): n is a, c, g, or t
  misc_feature (665)..(669): n is a, c, g, or t
  misc_feature (673)..(696): n is a, c, g, or t
  misc_feature (698)..(711): n is a, c, g, or t
  misc_feature (713)..(716): n is a, c, g, or t
  misc_feature (720)..(720): n is a, c, g, or t
  misc_feature (722)..(728): n is a, c, g, or t
  misc_feature (730)..(737): n is a, c, g, or t
  misc_feature (741)..(758): n is a, c, g, or t
  misc_feature (760)..(769): n is a, c, g, or t
  misc_feature (771)..(785): n is a, c, g, or t
  misc_feature (787)..(787): n is a, c, g, or t
  misc_feature (790)..(791): n is a, c, g, or t
  misc_feature (793)..(798): n is a, c, g, or t
  misc_feature (801)..(805): n is a, c, g, or t
  misc_feature (809)..(810): n is a, c, g, or t
  misc_feature (814)..(815): n is a, c, g, or t
  misc_feature (818)..(821): n is a, c, g, or t
  misc_feature (824)..(832): n is a, c, g, or t
  misc_feature (836)..(841): n is a, c, g, or t
  misc_feature (844)..(844): n is a, c, g, or t
  misc_feature (847)..(855): n is a, c, g, or t
  misc_feature (858)..(871): n is a, c, g, or t
  misc_feature (877)..(882): n is a, c, g, or t
  misc_feature (885)..(889): n is a, c, g, or t
  misc_feature (896)..(896): n is a, c, g, or t
  misc_feature (898)..(902): n is a, c, g, or t
  misc_feature (904)..(925): n is a, c, g, or t
  misc_feature (929)..(929): n is a, c, g, or t
  misc_feature (931)..(934): n is a, c, g, or t
  misc_feature (942)..(943): n is a, c, g, or t
  misc_feature (945)..(945): n is a, c, g, or t
  misc_feature (947)..(955): n is a, c, g, or t
  misc_feature (957)..(959): n is a, c, g, or t
  misc_feature (965)..(967): n is a, c, g, or t
  misc_feature (971)..(982): n is a, c, g, or t
  misc_feature (987)..(989): n is a, c, g, or t
  misc_feature (992)..(992): n is a, c, g, or t
  misc_feature (994)..(999): n is a, c, g, or t
  misc_feature (1001)..(1009): n is a, c, g, or t
  misc_feature (1012)..(1014): n is a, c, g, or t
  misc_feature (1017)..(1020): n is a, c, g, or t
  misc_feature (1022)..(1022): n is a, c, g, or t
  misc_feature (1025)..(1031): n is a, c, g, or t
  misc_feature (1037)..(1038): n is a, c, g, or t
  misc_feature (1048)..(1050): n is a, c, g, or t
  misc_feature (1054)..(1060): n is a, c, g, or t
  misc_feature (1065)..(1079): n is a, c, g, or t
  misc_feature (1081)..(1093): n is a, c, g, or t
  misc_feature (1106)..(1108): n is a, c, g, or t
  misc_feature (1112)..(1118): n is a, c, g, or t
  misc_feature (1120)..(1125): n is a, c, g, or t
  misc_feature (1131)..(1133): n is a, c, g, or t
  misc_feature (1136)..(1138): n is a, c, g, or t
  misc_feature (1142)..(1146): n is a, c, g, or t
  misc_feature (1148)..(1171): n is a, c, g, or t
  misc_feature (1173)..(1177): n is a, c, g, or t
  misc_feature (1185)..(1189): n is a, c, g, or t
  misc_feature (1191)..(1192): n is a, c, g, or t
  misc_feature (1196)..(1199): n is a, c, g, or t
  misc_feature (1201)..(1217): n is a, c, g, or t
  misc_feature (1225)..(1232): n is a, c, g, or t
  misc_feature (1234)..(1239): n is a, c, g, or t
  misc_feature (1242)..(1276): n is a, c, g, or t
  misc_feature (1279)..(1292): n is a, c, g, or t
  misc_feature (1294)..(1322): n is a, c, g, or t
  misc_feature (1324)..(1331): n is a, c, g, or t
  misc_feature (1333)..(1336): n is a, c, g, or t
cggctgacggagcgagtagggggtgcgccgacccgactgccgcgcgaacttgtacacggtgnncgcgccctggctgagcttcttggagtaggcggcgttgtcgcggaacacgatggaggcagccgccagggcagcggcgacctcgccacccagatcaggggcggagctcacggacagtgaagggcgagggtacgccatgtcctccggccggttccagcagtaatggtcgtccggccggctgccgttgatcttagcagcacccacctgggcgtataacttgtcgatggtggaagcaagaggagttgaaggtgagtagcagatagtcggtgccccacttgatgagctccctgacatgnncntnctcccccatggccttgaacttggcgctgtactcaatagatagtcggtgccccacttgatgagctccctgacatggtcatactcccccatggccttgtacttggcgctgtactcgatnnngaaggtcttgaggatgtagtccgttccccacttgatgagctccctgatatggtcgagctcgccgatggccttgtacttggcgctgtactcgannnnnnnnnggnnnntnnnnnnnnnnnnnnnnnnaannnnnnnnnnnnnnnntcnnnnnnnnctggnnnncnntnnngtgtnnnnnnnnnncnnnnntccnnnnnnnnnnnnnnnnnnnnnnnnannnnnnnnnnnnnntnnnnttcnannnnnnntnnnnnnnnccannnnnnnnnnnnnnnnnntnnnnnnnnnncnnnnnnnnnnnnnnnanccnncnnnnnnacnnnnncctnntccnncannnnccnnnnnnnnncctnnnnnncantcnnnnnnnnnttnnnnnnnnnnnnnnttttannnnnnctnnnnnctcatcntnnnnngnnnnnnnnnnnnnnnnnnnnnncctncnnnntcctcccnntntnnnnnnnnncnnntccctnnntcannnnnnnnnnnnccctnnnccntnnnnnngnnnnnnnnntcnnnccnnnncnctnnnnnnnctgcgnncacttccctnnncaannnnnnnacctnnnnnnnnnnnnnnncnnnnnnnnnnnnnttcgcgctcccannngctnnnnnnnannnnnncatttnnnatnnnactnnnnncnnnnnnnnnnnnnnnnnnnnnnnncnnnnncctcaccnnnnncnnaccnnnncnnnnnnnnnnnnnnnnntctacctnnnnnnnnannnnnnacnnnnnnnnnnnnnnnnnnnnnnnnnnnnnnnnnnncannnnnnnnnnnnnntnnnnnnnnnnnnnnnnnnnnnnnnnnnnncnnnnnnnntnnnnacgctccctctt

SEQ ID NO: 4803 - DNA, 399 bp, Zea mays
gtctacaaccgacctcagaccccctgctacctgcacctctgtaaaataacgccgtcgccgtcgacccgtcgtcgccctctccctttctggtgtgcgtgtgacgcagcgatctctgtcgcagctcttgacgtctgaaccgtagctcctcccgctttgagccggcgcggggcgcgggcctcacgttccagctgccgcattgcacgtgttcagagaaagcgaacagaacagaacagaacagaacccgacccagaccctgaagagtctgaatgagtggcccatggccagtgagacgcgctgctgctggcaaatcagaggaggtgcagtgtaggcatcggggggaaaaatgtcttcttgggctcgtgctgcggcttcgtgcctgtcaatcgtcttcctactgtt

SEQ ID NO: 4804 - DNA, 871 bp, Zea mays
  misc_feature (864)..(865): n is a, c, g, or t
ctattgcttgaggcaagagatgttttcgggtggaaaggtctgataaatacttgcatgactgtttactactctctgaattgctctcattcactgttttcagcatttgttattttatgattttttatgcattgataggtagctgcttggaaggatgaagatggagattggtacgagactgggcttcatatcttttgtaagttacagttctggtccttgaggtcctcttcatcatatttcatgttcttgattatttcttttagaaaaattacagttaaaatgatggtttctacacatattaacaaactgttcagacacaccatcacacaaacttctaaggcactctttccttgtatcatgcctttatttttcctaatggcacaggactttctttcaaggacaatctttaaatacctgtgcaaagtcattattgtgaaaagaaattttgttaacttacagtagtgacaaaatagcctgaaaagtttgcagacaccttaaacatacagcagcacatgtttcaattcacataaaccatgttgatgatagaccatcatatccataatgccatagtcgaatatgtccttatgttcacatatcactggattgctaccattcccttcctagcatatatgacacttattatgtatgtgtatgtaaccatgtattttggatttttggtttaagttggagcttatcccaacatacagaatctgtttggcgagcttaggattgaggatcgtttacagtggaaagaacactctatgatattcgccatgccaaacaagccaggagaattcagccggtttgatttcccagaaactttgccagcacctataaatggtaagttatacacaacggtggagttanngcaaca

SEQ ID NO: 4805 - DNA, 406 bp, Zea mays
gaatcgacggggtgaataaaccatagataaatttaaattccgggatggatggatggtcgcagcggatgcagaaccctcacgtggacgtggagttccggagcgaaatcaagatcatggcgcgcatcgagcaccagagccttgttcgcttctacggctacatggagtgcggcgaggagcgcatcgtcgtcgtcgagtacgtccctaacggcaccctccgggagcacctcgacagtaagcgaccacctgccattgctgctgctctgcttccaactccatctgccatctctcacctcgcaagaaccaactccaaccaagcagggtgcaacgggcggttcctggacttcggcacgcggctcgacatcgccatcgacgtcgcgcacgccgtcacgtacctgcacatgtacta

SEQ ID NO: 4806 - DNA, 613 bp, Zea mays
gggcgtctccccttccaccgacatggaggatatgacctccacggcctccagagggatggaggccctggcattgacgggtggcccgtcgcattacggcgatgccgaagctagctccaatgtcctggcccagagggatgagccgactttagaccctaccgcgctcgcggcgtcttcaggtcattgcgtggaggttgccgaactgggtacaacgagggaggagtggcgtaggtagcgctgcgcccctcggtgccttcagtgccgccaaggcaccgcgcggggaaggagccggtggcaattcacccccccacacgacagaggtggtgcctcgggtggggctttaggtgacgccgcaacctccggcgccgttggcgccattggggcaccttgagggtagggagccgagaacaatccccctctgcgccttcggcggttgctcagaggaaggtgaccacctgagcgcgctcctcacagtctgtcctgttttcctgctctctggttctcatccttgctctgcgtttttctctgacttccttggtcagtgcttatgtgccgcgcaagatggtgaaggatgcggctttggtggcgaagggggggaacacctcctttgtccgtc

SEQ ID NO: 4807 - DNA, 518 bp, Zea mays
ttggtaccatctctctctctcactcactctctgacaatgtagaacttagctagtggcactgcactgggtcggtcaactgaatgagcctccctggatgcgatgcgactgcagcttgcatgggcgattgccgacgaggaccgggtgaggaggaggagcttcgcagaccccgcggtgagcaaagggtgctcggacgagtcgctgaggacggtcatggagatctgtcagaggtgcctggccaaggaggcgtcgcagcggccctcggtggaggacgtgctgtggaacctgcagttcgccgcccaggtccaggacgactgggagacggatgcctggagcagcggcggaggaagcccagtgtcgtcgtcgtccagagccaccaggccgtctcggctacacttgagcagatagatgatcaggtgcttcaccaatctccagtaaagcggtcacatgatctacccatagtctaccggggacaaggacaaggatctaaagatgggaaatgctggtcagcctacagtaca

SEQ ID NO: 4808 - DNA, 414 bp, Zea mays
agaaatattaaatagatcaccaccattgaacttgtatgtagtgggattcctactctgatagatcacaaaatcgacaagattacctgagaagccgttcctgctgagatcaacctcgacaagccgcatggaattctggaggagtgtctcaggcatcatcccgaatagcccattcccggcaacgctgaaaaactcgagcgagaaccaggcatcgagcctcggcactgtcccagcaagcccgttgttgctcaaatcaaggaccgccaagttcttgaacgcccccaccgtctcgttccggaagaagcccccgtccaggttgttgtggctgaggttgagatacctgaccgtgttcccgatgctggagaggctgcggaggtccaaatcgatggtcccggtgaagaggttgtcgctgaggtc

SEQ ID NO: 4809 - DNA, 403 bp, Zea mays
agcagctcgcccgggccgcgcgccctagcacgcgctcgcccagatcgcgcgcgtctctgctcgctccagccttctccctcttggttctctgctgctcgggctcctctccatggacgtccaggtctcttccccatgttggccgaccccatgttcgaactccgaaggcagacgtctctactcctcttcccatggcgacctcgccttcactgcctctatttttttcccccaagccgacgccctctccctcttatctttctctctgctgcagcgcccagcgccttcattttcccagccatggacaccagcgtccttctactcctccttccccatggctgtgcacctctctgcagcaacccatccgcaacgccgtcgaccctcggtgaggtcctgttctagctgtcat

SEQ ID NO: 4810 - DNA, 1316 bp, Zea mays
  misc_feature (757)..(765): n is a, c, g, or t
  misc_feature (769)..(772): n is a, c, g, or t
  misc_feature (776)..(778): n is a, c, g, or t
  misc_feature (787)..(798): n is a, c, g, or t
  misc_feature (807)..(829): n is a, c, g, or t
  misc_feature (831)..(831): n is a, c, g, or t
  misc_feature (836)..(842): n is a, c, g, or t
  misc_feature (844)..(846): n is a, c, g, or t
  misc_feature (848)..(856): n is a, c, g, or t
  misc_feature (863)..(866): n is a, c, g, or t
  misc_feature (868)..(872): n is a, c, g, or t
  misc_feature (875)..(880): n is a, c, g, or t
  misc_feature (883)..(887): n is a, c, g, or t
  misc_feature (889)..(893): n is a, c, g, or t
  misc_feature (895)..(907): n is a, c, g, or t
  misc_feature (909)..(912): n is a, c, g, or t
  misc_feature (916)..(920): n is a, c, g, or t
  misc_feature (924)..(924): n is a, c, g, or t
  misc_feature (926)..(926): n is a, c, g, or t
  misc_feature (928)..(934): n is a, c, g, or t
  misc_feature (941)..(944): n is a, c, g, or t
  misc_feature (946)..(946): n is a, c, g, or t
  misc_feature (948)..(952): n is a, c, g, or t
  misc_feature (956)..(957): n is a, c, g, or t
  misc_feature (959)..(974): n is a, c, g, or t
  misc_feature (976)..(980): n is a, c, g, or t
  misc_feature (982)..(986): n is a, c, g, or t
  misc_feature (990)..(1002): n is a, c, g, or t
  misc_feature (1004)..(1004): n is a, c, g, or t
  misc_feature (1015)..(1015): n is a, c, g, or t
  misc_feature (1017)..(1035): n is a, c, g, or t
  misc_feature (1038)..(1053): n is a, c, g, or t
  misc_feature (1056)..(1059): n is a, c, g, or t
  misc_feature (1061)..(1071): n is a, c, g, or t
  misc_feature (1077)..(1077): n is a, c, g, or t
  misc_feature (1079)..(1081): n is a, c, g, or t
  misc_feature (1083)..(1092): n is a, c, g, or t
  misc_feature (1099)..(1105): n is a, c, g, or t
  misc_feature (1110)..(1115): n is a, c, g, or t
  misc_feature (1118)..(1135): n is a, c, g, or t
  misc_feature (1139)..(1144): n is a, c, g, or t
  misc_feature (1148)..(1153): n is a, c, g, or t
  misc_feature (1155)..(1155): n is a, c, g, or t
  misc_feature (1161)..(1170): n is a, c, g, or t
  misc_feature (1172)..(1180): n is a, c, g, or t
  misc_feature (1182)..(1185): n is a, c, g, or t
  misc_feature (1191)..(1198): n is a, c, g, or t
  misc_feature (1202)..(1212): n is a, c, g, or t
  misc_feature (1215)..(1224): n is a, c, g, or t
  misc_feature (1231)..(1242): n is a, c, g, or t
  misc_feature (1245)..(1252): n is a, c, g, or t
  misc_feature (1254)..(1257): n is a, c, g, or t
  misc_feature (1259)..(1259): n is a, c, g, or t
  misc_feature (1263)..(1265): n is a, c, g, or t
  misc_feature (1267)..(1277): n is a, c, g, or t
  misc_feature (1279)..(1279): n is a, c, g, or t
  misc_feature (1284)..(1289): n is a, c, g, or t
  misc_feature (1295)..(1299): n is a, c, g, or t
  misc_feature (1305)..(1310): n is a, c, g, or t
  misc_feature (1313)..(1313): n is a, c, g, or t
tttttgctctatttcttttatattttaagcataaacaatttgctcgatacatacttgcagcagaaaccagttcattacttaaaatattacaaactattgagtattgaccagctactgaaaagtatacatcttatacagactattgctgtagtacctatgccggcgtttggtgtggcacagttcggttccatgcaaaaggttagcattctagttttttggaagcaattttcacacgattctaacagaaaagactacccatgatcataagtgtcttcattttggttgttacaagaacaattttgtctgtgtttcccttaagatgctatctttagattcataacagatcttgagaaaatgcactacgaaatctggcatgaagaataatcgaaatctatgagaatgcacattgtgagaaaaatctgtcttttctgcactatgaaacacttaaaaaatttgtgcaatgctaatttatatatttttgaaaaaaactagggacaaattaaaaaaaaatccctttcaaaaaaaaaaaaaaaactagggactcaatgtgcatacattctcatgaatactcaaagtttcacattaacaggtttctgaaagcttacagtttctggatcaagttaaaggtgcaacatttctgatggaaagtctttcatggtctccttcaacaaaagatgctcagaaagatgctttcatgtacaatccacaatttcaactcgattcttcaaccactaaagagggtcttcacgcactaagnnnnnnnnnaatnnnntccnnntatatcctnnnnnnnnnnnntctcttcannnnnnnnnnnnnnnnnnnnnnntnccacnnnnnnntnnnannnnnnnnntttctcnnnncnnnnntcnnnnnnatnnnnntnnnnncnnnnnnnnnnnnntnnnnaaannnnntctnanannnnnnncaaaccnnnncnannnnncatnncnnnnnnnnnnnnnnnncnnnnntnnnnnatcnnnnnnnnnnnnncnaaatcaacaancnnnnnnnnnnnnnnnnnnntcnnnnnnnnnnnnnnnnatnnnncnnnnnnnnnnncccaancnnncnnnnnnnnnnaccttcnnnnnnnctccnnnnnnccnnnnnnnnnnnnnnnnnntaannnnnnctcnnnnnncnctcccnnnnnnnnnncnnnnnnnnntnnnnctctannnnnnnncacnnnnnnnnnnntannnnnnnnnncaatctnnnnnnnnnnnnctnnnnnnnnannnncncctnnncnnnnnnnnnnncnactcnnnnnnaccctnnnnncctcannnnnnccntct

SEQ ID NO: 4811 - DNA, 690 bp, Zea mays
  misc_feature (377)..(378): n is a, c, g, or t
  misc_feature (483)..(484): n is a, c, g, or t
  misc_feature (487)..(487): n is a, c, g, or t
  misc_feature (554)..(555): n is a, c, g, or t
  misc_feature (570)..(570): n is a, c, g, or t
  misc_feature (581)..(581): n is a, c, g, or t
  misc_feature (626)..(626): n is a, c, g, or t
  misc_feature (628)..(628): n is a, c, g, or t
  misc_feature (653)..(653): n is a, c, g, or t
  misc_feature (655)..(655): n is a, c, g, or t
  misc_feature (657)..(658): n is a, c, g, or t
  misc_feature (669)..(670): n is a, c, g, or t
  misc_feature (674)..(676): n is a, c, g, or t
catctatcgattagatgaagcatctgcgttatctaagctttaatctggactgttctcatcgcagtgtggagcttattttcccaagcacatttagcaaactttaccatatgcagagcatatatagtgagaaaatttcctgcgccaaagacgtgacacaaaatctcacttccttgcggcacagctcttcgtcgtggatgggatttgcaaacgttggcaggctgacgtcgctccaatcgctacggtacttccaagtgaagagagaacaggggcacgaactgaagcagctgaagcacctgaacaaccttcgaggcactctggcgattgacggtctgggggtcgtcagaagcaaagaggaagctcttgaagcacacctagannccgtcagtcgccagagtgcctcgaaggttgttcaggtgcttcagctgcttcagttcgtgcccctgttctctcttcacttggaagtaccgtagcgattggagcganntcngcctgccaacgtttgcaaatcccatccacgacgaagagctgtgccgcaaggaagtgagattttgtgnnacgtctttggcgcangaaattttctnctatatatgctctgcatatggtaaagtttgctaaatgtgcttggnanaataagctccactgcgatgagaacngncnnattaaagcttnnatgnnncagatgcttatcta

SEQ ID NO: 4812 - DNA, 477 bp, Zea mays
cccagcagtttctgctggtgtgaatataaatttcagagatgctcatggatggactgcactccattgggctgcattttgtggcaggtaagcgtttcagagtgatattgtatatgcacatattctatatgcatactgatgttgtttcacctgttatccagagagcgaacagttgttgcacttatcgcacttggtgcggctcctggagctttgacagacccaacgccaattttccctacaggaagcacaccagctgatctggcatcagctaatggatacaaggggatctctggtttcttggccgagtcttctttaacaagtcatcttcagaccctcgatcttaaggaaggcaaggggagcaatccgccagaaatatccggtctgcctggtattggagatgttactgaaagaagagcatcaccattagcaggtgaaggtcttcaagctggatccatgggagattcactaggtgctattcga

SEQ ID NO: 4813 - DNA, 1512 bp, Zea mays
  misc_feature (505)..(513): n is a, c, g, or t
  misc_feature (515)..(517): n is a, c, g, or t
  misc_feature (520)..(525): n is a, c, g, or t
  misc_feature (528)..(533): n is a, c, g, or t
  misc_feature (535)..(537): n is a, c, g, or t
  misc_feature (542)..(543): n is a, c, g, or t
  misc_feature (553)..(559): n is a, c, g, or t
  misc_feature (565)..(567): n is a, c, g, or t
  misc_feature (569)..(570): n is a, c, g, or t
  misc_feature (577)..(584): n is a, c, g, or t
  misc_feature (588)..(591): n is a, c, g, or t
  misc_feature (601)..(614): n is a, c, g, or t
  misc_feature (618)..(618): n is a, c, g, or t
  misc_feature (620)..(630): n is a, c, g, or t
  misc_feature (633)..(641): n is a, c, g, or t
  misc_feature (647)..(647): n is a, c, g, or t
  misc_feature (650)..(650): n is a, c, g, or t
  misc_feature (654)..(656): n is a, c, g, or t
  misc_feature (658)..(660): n is a, c, g, or t
  misc_feature (662)..(671): n is a, c, g, or t
  misc_feature (673)..(677): n is a, c, g, or t
  misc_feature (680)..(681): n is a, c, g, or t
  misc_feature (684)..(687): n is a, c, g, or t
  misc_feature (690)..(690): n is a, c, g, or t
  misc_feature (693)..(698): n is a, c, g, or t
  misc_feature (701)..(702): n is a, c, g, or t
  misc_feature (705)..(707): n is a, c, g, or t
  misc_feature (710)..(720): n is a, c, g, or t
  misc_feature (727)..(734): n is a, c, g, or t
  misc_feature (740)..(742): n is a, c, g, or t
  misc_feature (748)..(748): n is a, c, g, or t
  misc_feature (750)..(751): n is a, c, g, or t
  misc_feature (753)..(762): n is a, c, g, or t
  misc_feature (767)..(771): n is a, c, g, or t
  misc_feature (775)..(779): n is a, c, g, or t
  misc_feature (782)..(784): n is a, c, g, or t
  misc_feature (790)..(809): n is a, c, g, or t
  misc_feature (813)..(815): n is a, c, g, or t
  misc_feature (817)..(817): n is a, c, g, or t
  misc_feature (820)..(832): n is a, c, g, or t
  misc_feature (835)..(861): n is a, c, g, or t
  misc_feature (865)..(873): n is a, c, g, or t
  misc_feature (876)..(876): n is a, c, g, or t
  misc_feature (878)..(904): n is a, c, g, or t
  misc_feature (906)..(913): n is a, c, g, or t
  misc_feature (917)..(919): n is a, c, g, or t
  misc_feature (921)..(928): n is a, c, g, or t
  misc_feature (935)..(936): n is a, c, g, or t
  misc_feature (939)..(948): n is a, c, g, or t
  misc_feature (951)..(954): n is a, c, g, or t
  misc_feature (961)..(977): n is a, c, g, or t
  misc_feature (983)..(986): n is a, c, g, or t
  misc_feature (988)..(999): n is a, c, g, or t
  misc_feature (1004)..(1012): n is a, c, g, or t
  misc_feature (1016)..(1031): n is a, c, g, or t
  misc_feature (1035)..(1044): n is a, c, g, or t
  misc_feature (1054)..(1059): n is a, c, g, or t
  misc_feature (1061)..(1062): n is a, c, g, or t
  misc_feature (1064)..(1065): n is a, c, g, or t
  misc_feature (1072)..(1077): n is a, c, g, or t
  misc_feature (1084)..(1086): n is a, c, g, or t
  misc_feature (1091)..(1091): n is a, c, g, or t
  misc_feature (1093)..(1094): n is a, c, g, or t
  misc_feature (1102)..(1107): n is a, c, g, or t
  misc_feature (1111)..(1120): n is a, c, g, or t
  misc_feature (1122)..(1122): n is a, c, g, or t
  misc_feature (1124)..(1145): n is a, c, g, or t
  misc_feature (1149)..(1151): n is a, c, g, or t
  misc_feature (1154)..(1168): n is a, c, g, or t
  misc_feature (1174)..(1181): n is a, c, g, or t
  misc_feature (1184)..(1184): n is a, c, g, or t
  misc_feature (1201)..(1206): n is a, c, g, or t
  misc_feature (1208)..(1209): n is a, c, g, or t
  misc_feature (1211)..(1213): n is a, c, g, or t
  misc_feature (1216)..(1217): n is a, c, g, or t
  misc_feature (1221)..(1224): n is a, c, g, or t
  misc_feature (1230)..(1233): n is a, c, g, or t
  misc_feature (1236)..(1244): n is a, c, g, or t
  misc_feature (1248)..(1254): n is a, c, g, or t
  misc_feature (1257)..(1258): n is a, c, g, or t
  misc_feature (1261)..(1261): n is a, c, g, or t
  misc_feature (1270)..(1274): n is a, c, g, or t
  misc_feature (1276)..(1279): n is a, c, g, or t
  misc_feature (1281)..(1292): n is a, c, g, or t
  misc_feature (1295)..(1296): n is a, c, g, or t
  misc_feature (1298)..(1312): n is a, c, g, or t
  misc_feature (1318)..(1321): n is a, c, g, or t
  misc_feature (1323)..(1333): n is a, c, g, or t
  misc_feature (1335)..(1335): n is a, c, g, or t
  misc_feature (1342)..(1343): n is a, c, g, or t
  misc_feature (1347)..(1348): n is a, c, g, or t
  misc_feature (1351)..(1354): n is a, c, g, or t
  misc_feature (1356)..(1356): n is a, c, g, or t
  misc_feature (1359)..(1364): n is a, c, g, or t
  misc_feature (1367)..(1379): n is a, c, g, or t
  misc_feature (1385)..(1385): n is a, c, g, or t
  misc_feature (1389)..(1393): n is a, c, g, or t
  misc_feature (1399)..(1399): n is a, c, g, or t
  misc_feature (1404)..(1412): n is a, c, g, or t
  misc_feature (1414)..(1414): n is a, c, g, or t
  misc_feature (1416)..(1417): n is a, c, g, or t
  misc_feature (1422)..(1447): n is a, c, g, or t
  misc_feature (1449)..(1456): n is a, c, g, or t
  misc_feature (1462)..(1464): n is a, c, g, or t
  misc_feature (1468)..(1480): n is a, c, g, or t
  misc_feature (1482)..(1493): n is a, c, g, or t
  misc_feature (1495)..(1500): n is a, c, g, or t
  misc_feature (1502)..(1509): n is a, c, g, or t
ggggggctattgttacttctgtactgtgcatttgtaagccttctttccagtggtgttttgtgcatgctcaccacaaacttattcacccccttgcgcataggcataatctcaggaaagtcctcatcttctgctagactacttaagtcagctgaatcttgaagttgagatactttgctcaaccatctttctgcttttttatcactttcagcaagttttctctcaatttcagatttaccagcactcgttacactaagaagctgtgccacaccacctaaaccagaaccaacagatgcaggaatcgatgggattgttgctggcctcttgcaatcacattttaaacatgacatattcctcccataattatagaaatcacaccttagcaaaagaacaaaacacagtcagctatttcaaagatatataagcttaatacaaatattttagcaattagcatgtcagatcttactgagggcattcccactctccaccagtcagcatcttcttaaannnnnnnnnannnctnnnnnnttnnnnnntnnncctcnntcccgggaannnnnnntcccannntnngatcttnnnnnnnnccannnntacaaaaaannnnnnnnnnnnnnctanannnnnnnnnnntannnnnnnnntcatanctnccannnannncnnnnnnnnnntnnnnncannccnnnncanttnnnnnnctnnatnnncannnnnnnnnnnccccccnnnnnnnnctaccnnncccctncnntnnnnnnnnnncactnnnnncccnnnnnctnnnacacannnnnnnnnnnnnnnnnnnnctannnancannnnnnnnnnnnntannnnnnnnnnnnnnnnnnnnnnnnnnnctcnnnnnnnnnacnannnnnnnnnnnnnnnnnnnnnnnnnnncnnnnnnnncatnnncnnnnnnnntcccctnntcnnnnnnnnnncgnnnncactcannnnnnnnnnnnnnnnncccccnnnnannnnnnnnnnnncacgnnnnnnnnnatcnnnnnnnnnnnnnnnncctnnnnnnnnnnctcaacctcnnnnnntnncnnccccccnnnnnncttcccnnnccctncnnctctcccnnnnnncccnnnnnnnnnncnannnnnnnnnnnnnnnnnnnnnncctnnnacnnnnnnnnnnnnnnntccccnnnnnnnnctnctccccccccctccccnnnnnncnncnnnacnntctnnnnctcccnnnnccnnnnnnnnnctcnnnnnnnctnnccnccacctcannnnncnnnncnnnnnnnnnnnnccnnannnnnnnnnnnnnnncccttnnnncnnnnnnnnnnncnactaccnncctnnctnnnntntannnnnnctnnnnnnnnnnnnnctcctntcannnnncctccncacannnnnnnnntntnncctcnnnnnnnnnnnnnnnnnnnnnnnnnntnnnnnnnntcttcnnnatcnnnnnnnnnnnnnannnnnnnnnnnncnnnnnnannnnnnnncct

SEQ ID NO: 4814 - DNA, 365 bp, Zea mays
cgacgattttatcaacgaggtcgccatactctcccaagtgaaccacaggaacgtagtgaaccttttcggatgttgcctcgagacagaagtcccgttgctggtctacgagttcatttcaaacgggacgctccacgagcaccttcatgtcagtgctccacagtccttatcatggaaggagcgcaagaggatcgcccttgagatcgcgcggtctcttgcttacctgcattcttctgcttccatgtcgataatccacagagacataaagacagccaacatactgctagatgatcggctagtagccaaagtgtcggactttggggcttctcgaggcatccccatctatgagacttctgtgacgacgacca

SEQ ID NO: 4815 - DNA, 815 bp, Zea mays
tcttgtctccgtctgtctgcagcacgacgatgaaatctgagctgcgtgagtccgtacttcagagacttcgcacggtcaaaattagcaaatgctgactgatatccatgggaatgtgaaatttcagtggcattgttacttacgggcccaccgaggtactgaaatccagccaactctagctccttcagaatcccttcctctccgataacatacacctatattctggacgttaaacttcgcgcatgtttcgcgcgtacgttatttcgaatggcgagaggtaccttcttgtccttggggaaatcgatggactgcaggtacgcggcggctgcgaaagacgaagcgaagatctcttcctgcgcacaagcaagcagcgacccgcggccggcggtctcatcggttagcagcagcaggcagcagcagcagcagaggaaaccgacgaacagaagcgggttcatgacgaggagtgccgattatattaagaacccggccaacctcgtcgacgctcagccccagcgtctcgaacttcctgccgtactgcttcctcgacttggtggagttgttggtcacgaacaccagccgcttgccctgaaacggccggcgtaccagccagcagcactgcagcttcagtgggaacgagaggggatcgaggaaagcgttgtggttttgggacggacacggacctttgatcggagcaggtcgagagtctccggcacgccgtcgatcagcttgtcgcccttccagatcacacctgcgcggcacacgacacgcggacgcgcgagtttaaggcagacccatcacccattcacgcccactaccca

SEQ ID NO: 4816 - DNA, 375 bp, Zea mays
caaaggttcaagataatcaaagacgtagcgtcaggcctgctgtatctccacgaagactgggagaaggtcgtcgtccaccgggacatcaaggccaggccagcaatgtgctcctcgacgcggagatgagtggccggctgggcgacttcgggctctcaaggatgtacgaccatggcacggatccgagcaccacccatgtggtcggcacgatcgggtacctagccccggagctcgggcacagagccaaggcggcaccagccactgacgtgttcgcgttcggcgtgttccttctcgaggtcacgtgcgggaggccgcccgtcggggaggacgacgctcaagggagccaggccgtgcttgtagactgggtgcttcaccact

SEQ ID NO: 4817 - DNA, 408 bp, Zea mays
gccgcaagatggcccgcgacatcgagctcgccaggctcaagaagcaggccaaggccgagaagaagcagcagcagcagagtagtgccaacaaggagttcgccgactccaagcctctcgacgccattcttgcctgatatggtagagggcgcgcgagactaccgtaccgatccgttgttattgctgcgtgtgattaattttcatctataagaacatagctacgtacgtgcgatcgaccgtgtggtgattaattaaggtctgaataaaataatggctgcacaaaactaggaagcgatcgatcacccagataaatgtatgtgcgttcccttttctttcaatatgtgtaatttttcaacgtgcggttccagatgcatggactggactggaccggagtgcattgtaattctttat

SEQ ID NO: 4818 - DNA, 394 bp, Zea mays
cctcccaactgtggtcaactcgccggagataccggtatttccgctgatggagcagacgccggcgccgacgccagctacagagcagggcgctggcgcctgtggtgcacaaggcgttggagtcagcgtcgacagggcggaggccgcgccgaggaaagactggcacagcaagatatgcaccgccggcgggatgagggaccgccggatgcggctctcccttgacgtcgcccgcaagttcttcgagctgcaggacatgcttggattcgacaaggccagcaagacggtacaatggctcattaacacgtccaaggccgccatccaggagatcatggccgacgacgcgtcgtcggagtgcgtggaagacggctccagcagcctctctgtcgacggtaagtac

SEQ ID NO: 4819 - DNA, 1425 bp, Zea mays
  misc_feature (1364)..(1370): n is a, c, g, or t
  misc_feature (1405)..(1406): n is a, c, g, or t
ctctaaggatttgctagctgtttgtgccctgaattttacttcgatagaataatcgatttagttgtctgtttatatattgtgcagccaaatgtgccagctgagtttcggtctcatattggtggagctgctgtatctgcagcaaaggtgaatgtttctgaacattagtatatgcttaggagacaaatttgttgctctcagttcactattgttagttaagatcttttcattatctacctgccaattttttcgcaccaatatagaatgacaaatgtgcaagcaatttgcttcacatgactgccagttcaaagttatatgtattatctaatggatcattttagtagactttttttttctaataatactcaacagttggcaagctacctatcatttttcatgctatctgtcataaaacaagtggttctttctttgttttctctgttgatatgtttttagcagttattctgtttaatccttctgtttcacatatagggtcatttattggattgtttgtgttgaaggcagttggttactacaatgctggaacagtggagtttattgtggacactctttctggagagttctacttcatggagatgaatactcgactccaggtaatatatctatgataataatctgatatgattaagtaccttggcatttctttttgcatggtacttcattgatttacttgttaaaattctaaaacacaaaatcatcttgtgaatcaatcttggaaggttgaacacccagtgacagagatgattgttggtcaagatcttgtggagtggcaaatacgtgttgcgaatggagaacgactaccattatctcaggagcaggttccattaaatggtaaaccttaaaaataactcattgtgttacccaaaaaattcactgttgattcctgattgtcatgttgcccctcttagctactataggttgttcgcatcatgaacagcattgtgaatcttatctagttctataatttgaagatactgcctttaattattagcttaacagtacactgtaatgcaactaattggatacattttggtacttggattatcatggtattctgctgtttttaatgcaaactggctctagcctggctggctagctcatttgagagtggggtctatattccttttatacaagcgttttttccaaacattatcacttcattacttgtacccaagtatccattaagacatttatttatgattctgaaaactgaactgcatgctgctattggtttatgaataagaagctcacaattattttgttttcctttgaattggcttatctatatttgcatatgagccttctaaagttatagcgccactcatccagattacttcttaactatnnnnnnntttgatataggacatgcattcaagcacggatatanntgaaaagtccaagaggtct

SEQ ID NO: 4820 - DNA, 373 bp, Zea mays
tcagaagcgactggagcctaagacagccacgcaggcgcccaagcgaaagcccaagaagcagcagcagcagccagaggcggtgacgctcgagaccggcgcagcgccggtctcgccggagcagtcagcagtctccacgtcgaccaccagcaccaccactgactactcggcggcctcgtcgtcgttggagaacgcggatagcttcacctcggaggaggaggactaccagattgacgacagcttctggtccgagacgctggcgatggcggtcgacagttccgactccgggatggaggaggcagagggcgccttcggcgcgtcgccgccggcgccgtcgaccaacgacgacgtggacttctggctcaagctgttcatg

SEQ ID NO: 4821 - DNA, 573 bp, Zea mays
caatcttgctccctgattccagagcttgatcccttccgctggcatccacaaccacaaaactccctaggattcagagcggacacggagactgaaactggtcataaagccagttctatctatgagaactaatcaactccttgcgaatcactcaccgttcttgatccagaagctcttctggaacttggcagggaacaaggccagggacttgatgccctcgccgtcaatcacctaccaataaagcatgtcgattaggaaactaaacggtgcgtgactggacccggaagccccgcgaagcatcagtaagcgcctcacctcgatgacgttggagccacgcagcgtgaggacctgcatgatgctctcgccctcggcgagcgtgacggcggcgccttcgtcgcacgcccgccgcaggttcttcctccccgccttcatctgctcctctcccctctttgacgggtacaggtacgagggaggcggggctttgtttcccggggaccaaagcacgtgaaagaaacgacgacgggcagatacggcggcggcggcgaggggagcaaaactgtcacgggtcagataaag

SEQ ID NO: 4822 - DNA, 1471 bp, Zea mays
  misc_feature (447)..(448): n is a, c, g, or t
  misc_feature (559)..(559): n is a, c, g, or t
  misc_feature (561)..(563): n is a, c, g, or t
  misc_feature (565)..(565): n is a, c, g, or t
  misc_feature (567)..(570): n is a, c, g, or t
  misc_feature (572)..(586): n is a, c, g, or t
  misc_feature (589)..(595): n is a, c, g, or t
  misc_feature (601)..(601): n is a, c, g, or t
  misc_feature (604)..(612): n is a, c, g, or t
  misc_feature (614)..(614): n is a, c, g, or t
  misc_feature (617)..(617): n is a, c, g, or t
  misc_feature (620)..(624): n is a, c, g, or t
  misc_feature (627)..(629): n is a, c, g, or t
  misc_feature (631)..(634): n is a, c, g, or t
  misc_feature (637)..(649): n is a, c, g, or t
  misc_feature (652)..(658): n is a, c, g, or t
  misc_feature (660)..(663): n is a, c, g, or t
  misc_feature (669)..(687): n is a, c, g, or t
  misc_feature (689)..(689): n is a, c, g, or t
  misc_feature (693)..(694): n is a, c, g, or t
  misc_feature (700)..(717): n is a, c, g, or t
  misc_feature (720)..(725): n is a, c, g, or t
  misc_feature (728)..(740): n is a, c, g, or t
  misc_feature (747)..(747): n is a, c, g, or t
  misc_feature (749)..(750): n is a, c, g, or t
  misc_feature (752)..(760): n is a, c, g, or t
  misc_feature (762)..(766): n is a, c, g, or t
  misc_feature (769)..(770): n is a, c, g, or t
  misc_feature (772)..(775): n is a, c, g, or t
  misc_feature (782)..(789): n is a, c, g, or t
  misc_feature (795)..(796): n is a, c, g, or t
  misc_feature (798)..(801): n is a, c, g, or t
  misc_feature (803)..(810): n is a, c, g, or t
  misc_feature (813)..(820): n is a, c, g, or t
  misc_feature (822)..(822): n is a, c, g, or t
  misc_feature (827)..(828): n is a, c, g, or t
  misc_feature (830)..(843): n is a, c, g, or t
  misc_feature (846)..(857): n is a, c, g, or t
  misc_feature (862)..(873): n is a, c, g, or t
  misc_feature (885)..(913): n is a, c, g, or t
  misc_feature (915)..(915): n is a, c, g, or t
  misc_feature (917)..(920): n is a, c, g, or t
  misc_feature (926)..(928): n is a, c, g, or t
  misc_feature (934)..(956): n is a, c, g, or t
  misc_feature (958)..(977): n is a, c, g, or t
  misc_feature (982)..(984): n is a, c, g, or t
  misc_feature (989)..(1000): n is a, c, g, or t
  misc_feature (1004)..(1005): n is a, c, g, or t
  misc_feature (1008)..(1009): n is a, c, g, or t
  misc_feature (1013)..(1013): n is a, c, g, or t
  misc_feature (1015)..(1018): n is a, c, g, or t
  misc_feature (1028)..(1036): n is a, c, g, or t
  misc_feature (1038)..(1041): n is a, c, g, or t
  misc_feature (1043)..(1075): n is a, c, g, or t
  misc_feature (1077)..(1098): n is a, c, g, or t
  misc_feature (1101)..(1103): n is a, c, g, or t
  misc_feature (1107)..(1114): n is a, c, g, or t
  misc_feature (1116)..(1126): n is a, c, g, or t
  misc_feature (1128)..(1136): n is a, c, g, or t
  misc_feature (1139)..(1145): n is a, c, g, or t
  misc_feature (1151)..(1158): n is a, c, g, or t
  misc_feature (1163)..(1163): n is a, c, g, or t
  misc_feature (1167)..(1174): n is a, c, g, or t
  misc_feature (1176)..(1178): n is a, c, g, or t
  misc_feature (1180)..(1183): n is a, c, g, or t
  misc_feature (1185)..(1190): n is a, c, g, or t
  misc_feature (1192)..(1200): n is a, c, g, or t
  misc_feature (1202)..(1204): n is a, c, g, or t
  misc_feature (1208)..(1219): n is a, c, g, or t
  misc_feature (1223)..(1227): n is a, c, g, or t
  misc_feature (1229)..(1229): n is a, c, g, or t
  misc_feature (1234)..(1240): n is a, c, g, or t
  misc_feature (1245)..(1245): n is a, c, g, or t
  misc_feature (1247)..(1259): n is a, c, g, or t
  misc_feature (1262)..(1262): n is a, c, g, or t
  misc_feature (1264)..(1269): n is a, c, g, or t
  misc_feature (1271)..(1284): n is a, c, g, or t
  misc_feature (1289)..(1301): n is a, c, g, or t
  misc_feature (1307)..(1307): n is a, c, g, or t
  misc_feature (1309)..(1315): n is a, c, g, or t
  misc_feature (1317)..(1323): n is a, c, g, or t
  misc_feature (1325)..(1350): n is a, c, g, or t
  misc_feature (1355)..(1368): n is a, c, g, or t
  misc_feature (1371)..(1377): n is a, c, g, or t
  misc_feature (1384)..(1390): n is a, c, g, or t
  misc_feature (1397)..(1402): n is a, c, g, or t
  misc_feature (1407)..(1410): n is a, c, g, or t
  misc_feature (1412)..(1426): n is a, c, g, or t
  misc_feature (1430)..(1438): n is a, c, g, or t
  misc_feature (1443)..(1445): n is a, c, g, or t
  misc_feature (1448)..(1449): n is a, c, g, or t
  misc_feature (1452)..(1460): n is a, c, g, or t
  misc_feature (1462)..(1462): n is a, c, g, or t
  misc_feature (1464)..(1467): n is a, c, g, or t
agcatttgatgggctgcgacagagatcctaaacctgttgtcaggcgggatcctcccaaagtcgatgcccttccagaatggctgagcacaactgggaaacgttccaacgaagatagggcactttgcagtttatggactaggaatgccataggagttttattcccatctttatcatttggaagtgcaaaagatataaatgctttgtatcgtctgactgcctgatgacgcaaatttggtatgtttgcctcagacaccttttccctcccaaatgttccacatgacagataggttagcaaagccgtaacaactccacttccgatgaactcaaatgtcgaaacaccatcacccttgctaagctcagacaacatttcagctattatatcatccaattgctcctcaatattgcacaaaaattcatcggctcctctcccctcttcgacgtatgggnncaggtacgagggaggcggggctttgtttcccggggaccaaagcacgtgaaagaaacgacgacgggcagatacggcggcggcggcggcgaggggagcaaaactgtcacggtnannnangnnnntnnnnnnnnnnnnnnntcnnnnnnncccaantannnnnnnnnangantannnnncgnnnannnnagnnnnnnnnnnnnnctnnnnnnntnnnnaagtannnnnnnnnnnnnnnnnnntntgtnnatcccnnnnnnnnnnnnnnnnnngcnnnnnncannnnnnnnnnnnngtctaangnnannnnnnnnntnnnnnacnncnnnncaatcgnnnnnnnncccgannannnnannnnnnnnccnnnnnnnnanccacnncnnnnnnnnnnnnnnacnnnnnnnnnnnnacccnnnnnnnnnnnncttccatccacnnnnnnnnnnnnnnnnnnnnnnnnnnnnntncnnnngcgccnnncccccnnnnnnnnnnnnnnnnnnnnnnngnnnnnnnnnnnnnnnnnnnnttctnnnttcannnnnnnnnnnngatnnatnntccnannnncccccccccnnnnnnnnnannnntnnnnnnnnnnnnnnnnnnnnnnnnnnnnnnnnncnnnnnnnnnnnnnnnnnnnnnncannnctcnnnnnnnntnnnnnnnnnnnannnnnnnnncgnnnnnnnacaatnnnnnnnnccctngtannnnnnnnannntnnnntnnnnnntnnnnnnnnncnnnatgnnnnnnnnnnnncctnnnnncnccttnnnnnnnacaanannnnnnnnnnnnnccncnnnnnntnnnnnnnnnnnnnntcatnnnnnnnnnnnnnctcacncnnnnnnnannnnnnntnnnnnnnnnnnnnnnnnnnnnnnnnnatctnnnnnnnnnnnnnntannnnnnnctccctnnnnnnncattcannnnnngctannnntnnnnnnnnnnnnnnntcannnnnnnnnccccnnnccnnccnnnnnnnnnantnnnnccga

SEQ ID NO: 4823 - DNA, 1186 bp, Zea mays
  misc_feature (53)..(56): n is a, c, g, or t
  misc_feature (1125)..(1129): n is a, c, g, or t
  misc_feature (1173)..(1173): n is a, c, g, or t
cacgacgtacttggatgccatgtagccgccgccgttgaggcctccggtggcannnnggacgatcacctgcacaagctgcgccagcgagaagtcgacgctcgtcgtacctgcccactgtgtgtgtgtgacatagtttaatcaacaagactatcatcgggtgcagactctgcccttcgccgccagagctgactgtgcccaaagcacgcaaaaccaggtatgtagtgtggactgtggagtactctggctggctagctagctagtactctcattttttttacaccgcattaattggaaaaagtttaataatatagccgactgagtctatttgcagtctctctcagttcatccgtataattatagttagctcttcaatattttttgcaaaaccagcacttaccatctcttgtaaagttttttttggttcttgtgtctaacccagctgcagtccgttttccctatgtctcctctccactcctctctctctcttctgcatcggcatttagcctgcttaccacctctcgttatacttgctcttatgtttgtaatataagacagaaatttctaaatttggctctcgatttcaaagaacctatgtgtaatgtattgcgtattatggaagtacttgactagattatgaagaatattttaatttcagcatggatgaaaatacgcagtgtatactatatgtgttgcagctagctagtcagctatgcacgcatgaatctgtgaagcaagattgatcaggccggcgtacgacgtacgtacctgtcccacgatgttgaacctgcacatgcaagatcgacggggcggcacaatataaaagatgaaacttggttaggcacagcacagacgacacgacacgtacgctagacgattggaaatgtcgcctaataagtagctatatatatatcatatattaacagaagtaataaataataaaagcggaacgcattgtttatttgacacgtaccatccggtgagccaggaagcgaggggagcccagtccttgccggcgagcttagcgctccagtagtagaggccgccggaggtcgggtacgccgagcagatctccgccatggacagcgccacgcatgcgttgagggcggacacgaggaaccagcccannnnnatggacaccggcccgccgtagcgcaggccggtgtgtaggtgatntcacgcccatcag

SEQ ID NO: 4824 - DNA, 921 bp, Zea mays
  misc_feature (535)..(535): n is a, c, g, or t
  misc_feature (540)..(541): n is a, c, g, or t
  misc_feature (590)..(590): n is a, c, g, or t
  misc_feature (592)..(779): n is a, c, g, or t
  misc_feature (782)..(794): n is a, c, g, or t
  misc_feature (796)..(804): n is a, c, g, or t
  misc_feature (806)..(895): n is a, c, g, or t
  misc_feature (900)..(902): n is a, c, g, or t
  misc_feature (907)..(918): n is a, c, g, or t
taggctgctgaagggccaggaaataggcgtaggatatcagccagtaaggcgcgtccttcagcccgtgcatcttcatcattagtcttagcctctgctgcttctcgtagacaaggtatgtcaacattacctatatatgaaaaaaaaaagttgactttgtttacgagttcgctgaagctcagtgagtacagtaagacttgactcactggaaggaggagctgaaccgtccaggtgaagaagagggcgtccaggagagtggtgaggtccagccgcattttgattgcagctttgggcatctctttcagaaactccaggcgcatttctgtagtccctccttttaataacaagttcagatatgcagtggacgcctacaatggaaatgcatagccaacatttaaaaaaaaagtataatcatatattaaggttcagctatttctcactcaaaaagtatgctgaaagcaaaaaaaaaaaaaaaaaaaaatggggggggggggggttggggccctttttaaccccccgggaaaaccccaaaaccccnggggnngggggcccctttcccccggggaaagggggggttcaccaaaaaaaaaaanannnnnnnnnnnnnnnnnnnnnnnnnnnnnnnnnnnnnnnnnnnnnnnnnnnnnnnnnnnnnnnnnnnnnnnnnnnnnnnnnnnnnnnnnnnnnnnnnnnnnnnnnnnnnnnnnnnnnnnnnnnnnnnnnnnnnnnnnnnnnnnnnnnnnnnnnnnnnnnnnnnnnnnnnnnnnnnnnnnnnnnnnnnnttnnnnnnnnnnnnntnnnnnnnnntnnnnnnnnnnnnnnnnnnnnnnnnnnnnnnnnnnnnnnnnnnnnnnnnnnnnnnnnnnnnnnnnnnnnnnnnnnnnnnnnnnnnnnnnnnccccnnnccctnnnnnnnnnnnnccc

SEQ ID NO: 4825 - DNA, 434 bp, Zea mays
ttgctgcagtgccaaagaagtatagagatgaaaggactgttcaacaggcccttacagatttaacttgggtgcaagatattcagggaaatctctcgctgaccggtattgagcaatatcttcagttatgggtagttcttggcggatttcagttacaaaataataatgacaatcgtgtgtggaggtggaggtgacaatggactctaaattttacactataatatttaaggatcggatcggattaggatctgaccctatttctattcatttttgaactaaaattttatttagggccctaccattttgcgaagaagcatttggatcacgatccattaccacccctatgtggaggtttagtagtaatggcttgtttagctccagatcagcctacagagccttcttcattggaactgaaacctttgagtcttgggaaaggg

SEQ ID NO: 4826 - DNA, 412 bp, Zea mays
  misc_feature (377)..(379): n is a, c, g, or t
  misc_feature (381)..(382): n is a, c, g, or t
  misc_feature (385)..(391): n is a, c, g, or t
  misc_feature (394)..(395): n is a, c, g, or t
acaccatgccgtagctgtacacatcagccttgctgcccactgcctcgtagctcctcgagaagacttcgggcgctatgtaccctaccgtgcccctcgccccggcgatggacaccctgctcgccttctgcccgcacagcttcgccagcccgaagtccgagatcttgggacacatgtcctggtccagcaggatgttgtgcggcttgatgtcgaagtgcacgatgcgggtgttgcagcccgtgtggaggtactccagccctcgcgcgactccaacgacgataccgaacagcctgtcccagctcaaggcgtcttctccactgctgctgccgaaggtgtacctctcgagggagccattgggcatgtactcgtacaggagaaannngnntannnnnnngcnnatcggtctcgtagttgg

SEQ ID NO: 4827 - DNA, 419 bp, Zea mays
cctgcagctggtcatcaaggagacgctgaggctgcatgtcccggggccgctgctgatcccaagggagtgccaggagcagtgccggatactgggctacgacgtgcccaggggagccatggtgctcgtgaacgcctgggccatcgctcggagcccggatcactgggaggagccagacgcgttcgtccctgagaggttcgtcggtgacgcgagggatttcaagggcaacgacttggagttcatcccgtttggcgccgggaggaggatctgccctgggatgtcgttcgggctggccagtggccaacgtcgagctcggtctcgccagcttgctcttctacttcgactggagtctcccggcgggcgtccttcctgctgagatggacatggccgagaccatggggatcactgctaggaggaaagca

SEQ ID NO: 4828 - DNA, 996 bp, Zea mays
  misc_feature (944)..(944): n is a, c, g, or t
tgagatctacagcagaaacccctcctgctcacacatattcaaatatattagcttttcaagtcatatataaaatttaaaatgtagaactaaaataaacttgacacattattaacaaaaacacctaacgcttttatataacatggtcaggaaaaaaatgtgtaaatggttatgcaattgtgtcttaatatctaattttttcgttccctcaaatcactgtgatctactaacatgagtcgaacactaatacttgcatgtaatagtgatataccttccgcaatgaattgatgagggtgccgagtgggggagagttaacttttgctcgtctcgaaatctgaatttgattggaaaaaatagaatcggtgcatgattaaattttgctaagccagtaaatgaaccaagcagattgatgaatgagtgaatattgaactccaagacatacctcatcaagtcttatatatccaggaggcaacctcgggtcactctcttcaatcatcatgccaagaagtttttccaaagagacaccattttcaattgtgcatgcccatccccattcgttggccaagcctagcatttcggtaaggaaagaggcatcgtggagaggacctgtccaaagtgggcctacaacagtgattgaatcggcatcctgtgaaaaagggacaattatatactagcacagttccatggccaagtactccaaaaacaacgcaactcgatcaggtttcttgcatggcataggcatacaattatcatcgaagattattcattagtaaaccaacatcagggttagctacaaatgatatcgttccttaaatgacacttgagtacttgactcctatgttattttgtgttaattaatactgacaaagttaaatggttagggcctaagtttcctgaatcaaccaccagtaataaaacaacaatttagtcctgccacaatgatccantgtacctactgttgtgtctgtacatccacaagaaatctgccccagctcatca

SEQ ID NO: 4829 - DNA, 439 bp, Zea mays
tgggcctcgccgctcatccgcctcaccaacaagcccaacgccacgatcgaggacatcggcagccccgagaggctgatcgcctcgctggggcctttcgtcaccggcaacaccttcgactccgacgagctcgtcgacaccaacgtcgagaacgtcgatggacagactgtaacttactgacctcgagcatcacctgcaaatcttttctgctctcggactattttagcgagcgagcgagctgcttatgcgggtcactgttcctgtcatgcagtactacagctacgtgctggagactccattggcgctaacaggttcgcacaacctggccaaggccaccgccaaggggagcacggtggtgctgttcgtcgcaagcgccaacgacaagcagtggccggcgtcgcagaaggttctgaaagccatagtggactcgtttcaaatatga

SEQ ID NO: 4830 - DNA, 376 bp, Zea mays
ctgggcagctggtggatctaccgtgtgtcattcaagtgcaaagagctggtgtagaatatattttagttctgaagagcgagttaaccatgtggtgctgaatagcagatattttgaatcatttctaactgaagtaggtacttgaattggcttttcagtaggtgctgtattactgttttttgaaagcagcgatgtccaatgttttgctagagtattttgcaagaatataatggaagtatggagcccggtggccggtgctatttctcacagggcataaagcaattccatgtggaagatacatttcttgtcacatagcaaatcgttgtcctgggtgtgttttctgtacaatcgccaatggattgcattatgtcccaaatgt

SEQ ID NO: 4831 - DNA, 454 bp, Zea mays
cgcactcgtagtagcactaaaaaaaaagtcaagtcagaggcggcgacaccccgcgtcacgtgccgtcggtgcggcaggaacgataagcgctcgtcgcgcctagatctcacccatacaaaattcgtttgcgccatgcagacgcgccacgccaaccgtctctgccgagccgccgtcgacttcctgcctcagataaaataaaaggttgatccttgcgtgcgtgccgctgatacgactcccgaccgggtccatttcggcggcacgccccgccgcgttccccaccgcgctatattgcgtgccgctgatacgagtccacatcgccatcgcgtcccacacgctcacagtcacagcatggcacgccaccctctcgcggctgctgtcctcttcctctgcctgctgtcggtctgccgcgcggccggcgccggcgccggcgccgctggcaaaggtaaaccgagca

SEQ ID NO: 4832 - DNA, 396 bp, Zea mays
  misc_feature (389)..(390): n is a, c, g, or t
gttccatgaccaaaaaagatgcgatgaagcaaggctgaatgctctgtcagaagaaatggacctactcaatgccaagatcgacgagctatccagcgagagaaacgacctctctgaaaagaacgcgcagaaagacaaggaactggccggaatcagtgaaaaggacatgcagttgcaagacaagactgctgagatcacttcactaaataaggagcttgtatctctcaaagaccaagtgaagacgcatctggacgaactgcacgatttaaaatgtctgaaggacaggaaggaggagacaattggaaaactgcaaatagatattgggtcactgaaactccagtgcgacaacttgaagacttcgctgtccaagaaggagtccgagaaagataacnnttgcct

SEQ ID NO: 4833 - DNA, 434 bp, Zea mays
gtcgactcggccaacggatacattggctttggacccaccacctgctagatcaaatctgtgtgtctgctgcctaaaacaaagctagcttactcggtcgggcgggcgggcggactcatgcatgcgttgggttggttctaaataggccatacgggatgagagtatatagagtccttgtagtacgtaaatttgaggtaacaaaaggttgaagaaggcagtgtgtgtgtcagtccagcaccatgatgaatgttgtgcgcctgcactgaaaccgtgggtgatggtctctgtacagatcgtagcatgaacattttcactttgtgcaaggctgcgatgagatgggacgaacatgttcacttggcttgtaaaaggggccaaggctgcgacgcgatgaacctgtttcacttgccttttccaccgtgactaaagtacaatcctca

SEQ ID NO: 4834 - DNA, 404 bp, Zea mays
ggctggacccgctcaactcgtctgaggaccgccacgacgaccgcgacagtcgtgccagcggcacgcgcgcggggagcgcggccgagagcagcgagaacgaggcggagagccagtccacgtccgcggacaggaaggacgggggcaagtcccgccattgtcgcagcctgtccatagacagcttcatgggcaagctcagcttcgccgcaggggaggagtctccgaagctgccgctgccgtctcctggtggcagcctcaccaggagcgggagtggctcactggaaggtggtgctgtcgcgctgttcaatatggagtttaccaacggagagtttaccgactccgagaagaagaaaattatggcgaatgagcgacttgctgagatagctttgacggatcctaagagggta

SEQ ID NO: 4835 - DNA, 456 bp, Zea mays
aaccaactacagcaaagggctccaggtactgttttttctttctttctttctcgttactttgcaatacctgaaaacatcagaaggaaggaaaaaaaaagaagaagaaaaagtcgagctggacgactgagccccatctaacagcagcagtgctggcctttcaggcaaggaagaagctcgtggcaatgctgcggcagatgatcgctgaccggaggtcctctggctgcgcccgagacgacatgctggacgtgctgctcagcggcaacgagggtaccagggcgaagctcagcgacgaccagatcatcgaccttctcatcaccctcatatactctgggtacgagactgtgtcgaccacctccatgatggcggtgaagtacctgtcggaaaaccccaaagctctcggacagatcagggtacacataacttctgcaaccgagctcaattccacagccaaaaaaa

SEQ ID NO: 4836 - DNA, 677 bp, Zea mays
ggttgcgtctcgcggcgggttctttgctcccggctgtggaagacgccgacgacgaggcctccttctgccggatcttcttgcgcagccgcgcgttccagaagttcttgatctcgttgtccgacctccccggcagcctcgccgcgatttgggaccagctaatacagataatgaccatcaaattagttcacaatcgacgacgacggccgggtcggtcgggttactatgagatggccatgcgtaattaaggcaagctgaggcaatggcgggaggcacatctgctgttcagcagagaggaggtcagttacctatttccaagtgctttgtggagagctatgatgaggtcttcttcctgctgggagaagcggccccgcttgaggtccgggcggaggtagttcatccaccgcagcctgcagctcttgccgcacctctgcaagcctacaaacacaactacaaccagttcactcactccgtccgatcccatccactactactatgtcagcaaacaggtctcagtggtgacggcattgcaaatttgcaacagcgtcaagaatgcatgcatatatatgttcatcacctgcgagttcggggatggagctccagcagctgacgccgaagcgcgcgatgtgggaggcgagcctctcgtcctcctccggcgaccacagacccttcctcacctt

SEQ ID NO: 4837 - DNA, 383 bp, Zea mays
caaaccaaaccaaaccaaaaacctttttgctagcttattcacagacagcagcttccaaccaatcaaactcatcgaccgatcgagtgctcgtacaccaatagctcagccagccatcaaatcctagctggaggtgcgtacgtacttggctagaggaggtagacgacgacggcgacgacgaccgacatgccgtcgcagcagcagcagcagcagggccagcaggtggcggcggggtcgacgcggtggtgcccgacgccggagcagctgatgatcctggaggacatgtaccgcggcggcctgcgcacgcccaacgcgtcgcagatccagcagatcacggcgcacctcgcctgctacggccgcatcgagggcaagaacgtccttctact

SEQ ID NO: 4838 - DNA, 400 bp, Zea mays
gggtggttgggcagagtgctgtcggtgcttcccgagcggcccatgtccgtgggcgggtcccccaggcacggcgtgtacgaaaccacggacttcgggtggggccggccggcgagggtggagatggtgtcggtggagaagacgcccgggacggtagcgctggcagacagcccggagggagacggaggcatcgagctcggggtggtgttgccgccggacgccatggatgcatttgcttcgtgctttgcgcatgccgtcggcgccaacgtctgattggcattccgatccgaggtgcagctgctgccttcaacaacacaggaccaaaagattcgattgaagcagcgtattatttgtgcttgattaattgatttactttactgtcttgagagtgagctcgttcttg

SEQ ID NO: 4839 - DNA, 386 bp, Zea mays
aattctcaagaagaaattctagaagctgagagggctttcaaagttaaatactttttggttttggttgacatggcaatcacctctttgaaaacaagattcgaagaactattgatatttaaaggtgtattcagatttctattgagttcaagcaccctgaagtcattaaatgatagtgaacttcaagagtgttgcattaaatttgcagacactttctctcatgatggttcatctgatgttgaggtacttgatctgatttctgaattaaagattttgaaattcactttgccagatcacacattatgtgctatggagatttttgagcatatcagagatgtgggttgttatcctaatgcatgtattgcttatcgaatcttattccaccgtgc

SEQ ID NO: 4840 - DNA, 416 bp, Zea mays
  misc_feature (226)..(226): n is a, c, g, or t
  misc_feature (229)..(234): n is a, c, g, or t
  misc_feature (262)..(267): n is a, c, g, or t
  misc_feature (270)..(272): n is a, c, g, or t
  misc_feature (274)..(276): n is a, c, g, or t
  misc_feature (283)..(288): n is a, c, g, or t
  misc_feature (290)..(290): n is a, c, g, or t
  misc_feature (302)..(303): n is a, c, g, or t
  misc_feature (305)..(307): n is a, c, g, or t
  misc_feature (335)..(337): n is a, c, g, or t
  misc_feature (364)..(366): n is a, c, g, or t
  misc_feature (370)..(370): n is a, c, g, or t
  misc_feature (375)..(380): n is a, c, g, or t
  misc_feature (389)..(393): n is a, c, g, or t
  misc_feature (399)..(411): n is a, c, g, or t
cgtcgtgtaggagtagtcgtcgtctgtggtgttcgacgcgccgccgcccgtgggcctgcggctagacctgaacctggcgctgccgccggccgagatggtgatgtgattgctgccgtccaggaggctaatcgattgctcagttaattagtcaccattagtagctaatcgatcaaggcagccgtcaggcagaggtgtaaataggatgcagatttgctcggtaacttgncgnnnnnncctccgctggtctcgtgaccaagcactnnnnnntcnnncnnngcggccnnnnnnangttcttcttatnngnnncggactgtccccctgggcggtcctgtgnnncccttgtacggggactcctcctcctgnnncgtnttctnnnnnngggcgcctnnnnnttcctnnnnnnnnnnnnncgccc

SEQ ID NO: 4841 - DNA, 444 bp, Zea mays
tggtctttcacaatgctaactgcattggtcgagcacacgaggaggagctattcaaaccgctatgtcgttctgcgtgcgagccttcaaggaattcgccttcacgcaactgctccatgggccggccaatcagagagctcagggccaagtcgtcccgtcctttgaaccggctcaattgacctcgtattctcaccttcgtttcgtagcaactagcaaccgtgacactctgatttgtcctctaagcacgcgccatatcagttcaccagctacttgttccggttgctatcggccatcgccatgtcgtcgtccctgtacaagcagctgggcctttcgggagccggctccccgctctccggccgccacctcgccctcctcgtcctcggcgccggcttcctcgcgctcaccgtcttcgtcgtccaccctaacgagttccggatccaatcttta

SEQ ID NO: 4842 - DNA, 396 bp, Zea mays
tcgcaagaagtaacgatcccatgttcgcctacaacggtttctccaacaccaacctcgagctcgacggcacggcctccatcacggagaacggcctgctcgagctgaccaacggcaaggtcatgagcaaaggccacgctttcttcccggatccactgcgcttccgcagatcccccaacagcacggttcagtccttctccgcctcgttcgtgttcgggatcatctcggtgtacaacaaccttagcagccacgggctggccatgttcgtcgccccaggcaaggacttctccgccgcgacgccggtgggctacctgggcctcttcaacgcgcagaacgacggcaacggcaccaaccgcgtcttcgctctcgagctcgacacctaccagaacagcgagttca

SEQ ID NO: 4843 - DNA, 719 bp, Zea mays
atttgatttggatggacaagagatgacaagtgaagctcaatctgtgtcagctattcatgaagcaagagagggagaaggtagcaaaagtagaaagcgtaagcagagccatgttggagcagctctcgaagactatgtggagttcaaaaagagccaaactaacaaggcacttgatgctctcaaagaactttccatgaggaagtgtatggaggaaatagaagcaataggtggattcacagaagaggagaagtcatatgctgtggaggtctttgagtccgggattaatagagaggctttcatgtcaacaatgaaccacaatgttcaaagaatgtggctaaagcgcaaaatcaggtatgtccatagttaagcatgtaacaaaaaatagctttatgattttggtttcagcttacatgagcacatattcatagtgtttacatgagcagcaacatcttcatagtgtttacatccgtccatgttatatcattagacaaccaatttacataactgcatccttgaatggtaaagtagcttgtaggatacttggaacatagccttatgatgtttatgcatatggtgcatatttgtgcatacattgcttggatgtgggtttttctttgtgcatatagtgcatatttcctagttgtaaaatgttggtacatggtgtaaactaaaccgtgtgtcaattggtgttacttggtacttgtagagtgctgagtggaagc

SEQ ID NO: 4844 - DNA, 362 bp, Zea mays
atctgctcccggctcactcctccggctcggcggccgggtcggctagtgtgggcagcacagggtacttgcgcgagaagcacgcgtcgcagtagtccctcgactcttcgccgtagatgctgtgcagcttgcccagcgagaggaaggcgagtgagtcgctgccgatctcccggcgcacgccatccatgtccatccgattggagatgagctcgccctcgctcggcgtgtcgatgccatagaggcaggagcccacaactggtgggctcgcgatccgcatatgcacctcccgcgcgccggcgtctcggagcagccgcacgatcttgctcgaggtggtgccgcgcaccagggagtcgtccacgaccaca

SEQ ID NO: 4845 - DNA, 401 bp, Zea mays
  misc_feature (392)..(392): n is a, c, g, or t
cttggtgtggtggccgacattttccggggccccttcctccctctggatctcgtacgtcgcccactcctccgctgtcgtcccgtgatgtgcagtgccgttaggcgttgctcttcatgaggcaaagtgacaagttgaagcatcaagctcaaccttctgttgccgagcgtctattcataccctcgagttttattcgatttcagttttattagtgcaggcggtatataatacgtcttgccgtggctttaaaaatggcagctatgctgagatagcagtaacgtacgagacatagtttgggcataacaatttaaaagcccaaaacattgcacgttttccctatattcaaattccctgtcggtaatttttatccatgcacacgagtttagaaggacgangctgtttga

SEQ ID NO: 4846 - DNA, 370 bp, Zea mays
acacccgtacagataatgaagcagctagcttcatcctggcgcatcgacctgcagcaacttatcaattagggttacattgattgtcgatatatgggttaatttgaatatttgaattgttcgtttccctctggttcttgtctggtctttagctattagtattaggaatattatattgggtggggtggaagtggcactgtgttgaaatggattggttgtattggaaaatatggtattgatgttgtctcaccttcattgaggctagggagcaacgaagaaaaattctaggttgggttttagatctccatcctcgtcctggtcctggtgacggaaaaagtttcctgcggggatcccataaactcttgcccgtatt

SEQ ID NO: 4847 - DNA, 365 bp, Zea mays
ccaccactcaatccatgaaaaaaacttttaactggacttccaaagaacatagcatccccactgaacagctctttcatggttgtgacaaagtcctgttgctccatgtccgggaggtaggctgctagacggagtctatcatcttccgtcaggcatgaattccatgtctccaaagaaagaacctcggccaagccaccatgcaggtcataaatcccataggggatattgcacatctggcctctcgacgatgcaagctcacagtccacctccgcctggtcagagccaagagattctggatcaggaaagctctggagaagcattctgtcctctcgtgtaaggtcctcacctccacaactgtaaccactcct

SEQ ID NO: 4848 - DNA, 715 bp, Zea mays
atcgattatgacctggctgtgctcatgcagcctatgctaatgcttgggatcagcattggtgttatttttaatgttatattccctgactggctggtcacagttctgctgataattcttttcctaggtgcttatcttgtaccgattcccaaaactatgaaatagctcatttattgttcatgaatgaccttacaccttcaaaattgatgacaggcacatccacaaaagcctttctgaagggcattgagacatggaagaaagagacagtaatccaaagggtaatcttttgtgacttccttgtctcctttgttaacaatgaggctttggcttacatatatatttttttacatcctatgatatagtaatgtgatagccttcttttcttccaggaggctgcgaaacttttggagcaaactgcaggtaagagagagagaaatatatgtgctcatctgtcacaaatactggatctattccttaccttttttcaaccgttcaggtgaggaagcagagtatgcagcacttcctactggaccagatgttgcaccaaacaaaaaagccctcacatcagatgaggcggtaaacatctaatgatcatatgtgtactcagctgcactcttttgaaactatagttgtaaggattttaatctagaaagtttccactgtttcagccatcgcttataaagaacatacactggaagaaggttggtcttctttcatt

SEQ ID NO: 4849 - DNA, 430 bp, Zea mays
gcttcagccttgagatcagacctcgcctttctgttctgacccctgcctgcctgccccaaacacaagctcccttagtcgtcgtagtcctctcgtttatcggttggtggacagtgtggatactgcgagagatcgatcaaaggaagaagagggaacaatcaagaagaagaagaagaagaagagatcgtttagctagggggtgcaacagcagaagaagaagaggaagtggaagaggaagagatctgtctcatcagtacgacgtacttgttgttggatacatacaaagatatatatatgtctcatcaggcgacggcgatgatgtccggcggcggcggcgcggggcagttcggcgacacgacgttgaccaaggtgttcgtggggggcctcgcgtgggagacgcacaaggacggcatgcgggcctacttccatcatt

SEQ ID NO: 4850 - DNA, 405 bp, Zea mays
ctggcgtcgcggaggctcatgttcttgcagcgggtggcctacctcaatgtcggcatctaccccttcacctccatcttcctgctggtctactgcttcatcccggcgctgtccctcttctcgggcttcttcatcgtgcagacgctcaatgtcgccttcctctgctacctgctgaccatcaccgtcaccctcatcgcgctcggcgtgctcgaggtcaagtggtcgggcatcgagctcgaggactggtggcgcaacgagcagttctggctcatctcgggaacaagcgcgcacctgtacgcggtggtgcagggtctgctcaaggtgatggccggcatcgagatctccttcaccctcacggccaaggcggccgtggacgacaacgaggacatctacgccgacctctacgta

SEQ ID NO: 4851 - DNA, 446 bp, Zea mays
cctctaggctcgacactaacaccatcatcaccctccatgctcaggctgtcggtgttcacaacatccggccccttgtgttcatcgtgttggatctggcattccttcactacccccactgacgtgatcaggtgctcctcacgctccggtggttcgccctcgtcgacgacgttctcgacgacgtcgtcgccccattgtctccatctggcaccagatggacaacgtggtcctctcgtggctctatggtaccctcaccatcgagctccaggacatcgtccgtgagcgggagggcatcgctcgccaggcatgggtcgccctcgaggaccagttccttgggaaccaggaggctcggacactccacctcgacgcttcgtttcgtctgttctcctagggggacctatccatcagcgagtactgccgtcggatgaaggacatggcatactctctaa

SEQ ID NO: 4852 - DNA, 403 bp, Zea mays
cgaagaggctcaaggaactggtggatccagcccttgtagactgccctgaggaagaagccatcaggtacatcatggtggccctcttctgcctacaggcggccgccgcgcgccggccgacgatgccccaggtcgtcaccatgctgtccaagcccgtccggatcaacgagagcgagctgacggcgccggggtacctccaggagtacagcaggcggagccccttgtccaaggccaccacttccaccgactccaggttcaagaacctggcgtcccaggaggactccaacatgttcagcacggtggtgccacccacggtgaccgagatgagccccaggtgaagcaaccgccatgtaattttgactgattccttccttgcgttttgtcaaccggcgactatatgatgtaa

SEQ ID NO: 4853 - DNA, 891 bp, Zea mays
  misc_feature (864)..(867): n is a, c, g, or t
  misc_feature (869)..(869): n is a, c, g, or t
tttcttttccgctcctcacataacagttcgactgatgattgaatatcatagccagtcatcttcaatgccctttttgcagaccgtgcttcatagcccatatccattaacattgatatagcttcgtctggcacttggagctaaatttcatatccgtttcacaaaaattaagatttaaactgatttgctaaacatgaaaagatgctaaagcactgaggttcagaggaataatatgctataagaagaaaataaaatatattttttacagaatgtacctgcaggtatttagcatgggcagaagtgagagattcacgcgccttttcaacatgaccattatggtatgccaccactccttccaaaagctccagccttacataactattacacaccaaaggaaaaaaaatgtatgctaggcatcaacacaagtgaactgtagaatgcttcaaaaggaaagtacccataaagaaccaagactagaacaagcttaataaactcctagttggtttcttaaaaaaacatatatctatattgctatagttccttccctctattggtcctttttccctttcgaagaagaagataccaggaccttccattcatccacacatgcacagatagagaaacctttttccataaatgttcccatacatttgtgtctaagtagcaattcagacttctgattgaaaatgagcacattcggtaaaaaaatataatacagcaagaggcaaataatagtaagggtctcacatagcaagatcagcttgccggccagcctggagtattctgaagcgggtggaatctttcccatgagaacgctcaaaacctaaccgtgctttttctaggcgggcccctgcgacctctagcacnnnnanaaaaaaaaaaaaaaaaaaaaaa

SEQ ID NO: 4854 - DNA, 382 bp, Zea mays
cgagcccgacatgggtgacaaggtccgcgctggcggcgtcgtgaggatccagtacaggagggtgccgtgcaagtaccccggcgtgaacgtggcgttcaaggtggaccagggtgccaaccccttctacttcaacgtgctgatcgagttcgaggatgctgacggcaacctcaacaccgtcgacctgatgttggctgacaacagagagtggacacccatggcgcacaactggggcgccacgtggtgcctcaacaacggcaggaggctcagagcgccgttcggtctccggctcacctccgactccggcagggtgctcgcccccaacaacgccattccggtcgcgtggaagctcggcaagacctactgttccttggtcaactaccca

SEQ ID NO: 4855 - DNA, 764 bp, Zea mays
  misc_feature (643)..(647): n is a, c, g, or t
  misc_feature (666)..(666): n is a, c, g, or t
  misc_feature (670)..(671): n is a, c, g, or t
  misc_feature (681)..(682): n is a, c, g, or t
  misc_feature (690)..(691): n is a, c, g, or t
  misc_feature (713)..(714): n is a, c, g, or t
  misc_feature (722)..(723): n is a, c, g, or t
  misc_feature (726)..(730): n is a, c, g, or t
  misc_feature (739)..(739): n is a, c, g, or t
  misc_feature (741)..(741): n is a, c, g, or t
  misc_feature (747)..(747): n is a, c, g, or t
gttggctctgtaaatctactagcgactgagatttccttttccgtatttcgttcacgaaatggcgatcttggttcagtggcccctaagcatttctcctgtggcttctaacatgtttgtatccccatagatttgttcagcagaagttgggtggcccgtcaatctctgactatgaaaagctcaaggcagagaagctggacttgcaattgaagtatgataagcttttagaaacccacaaggaaacatgcagacaggtatgtgatgttactgtgttggcactgtacactactctgtctatttacacggcacatttaatgttcagtagcatttggtgttacaactttcaccaaatttgcgtacgtggatatagatactccacagaaatgtcatgtatgattaagaagggttagttgttattgtcttaaagcttactgcttgtttgaagtaattctgcttatttgatgatgaaactcctgcactccaataatgtactcatagcaacaattctgtctttaacttaagtgcgggatgttctgaattccactagactgcataatgttcagctgacccaattggatgtttttggatgtagaaataccaatatacattaaaaaaaactcattttcatcacactgtgatctggcannnnngttctgtcatgtaaggccnggtnnttctcctcanntcatcatnnttgtgttttggttctatgcatnnaaattttnnttnnnnngaaagggangntgcggnaaggagtgatggcattt

SEQ ID NO: 4856 - DNA, 391 bp, Zea mays
tcttcactcacctcagcccgcttgctgctcacgcttttgtgctgtggttctgctcggtgtggatagcgctagcgtgctaatccaggttcagtctcagatgcgccatttgctttaccatgtgcggtcatgtgctgcgtgctgtattgatttgcatctaagctcgtattgatgcccgtgtctggggtgtggtggtgccatcctccattcttatcatgcaatcttgcagcagtgagtgctgcggtactactaccatgtaccttgtacaagatgccgtcccttcccttctggtcgctgttccgttcaccttcaccatgctctgccccctctatttggtaggtggtgctggcagtggtggttatgcttttatgacatcttctaccagtccgtcaga

SEQ ID NO: 4857 - DNA, 473 bp, Zea mays
ggtactgacatcataacagaatgtgcactcgccaaaagtttttagcaattcaactctagtcaattcagttgaactattgccacaaaattcataggtttccaccgaatgatctccaacagcaaacaggcactgagggagggaagcttgaactccttgccgcaagttattgttcaagaagtgattaccaaggtttgaatcatctgaaatattgtttccggcgtggtagtattcatcaagtttaatttgggcaattgatgccttgagccttacattttttggataagtctgcagatatcaacaagaaaaaatatcaaataccaagcttggtgaaactaaaatgatgcatggactaagaagccctgatgtaccagtaccagtacagacaaaatgaatacctgtagatcaagatgaatgttctcacacttggctttgagatgatgcatatttaagctggaagctgtagcaggagataa

SEQ ID NO: 4858 - DNA, 1180 bp, Zea mays
  misc_feature (43)..(44): n is a, c, g, or t
  misc_feature (1118)..(1118): n is a, c, g, or t
aggacccagcaaccacggcctctgaacaaggtactctgccttnntgttcaacaagcaagcaggagcaaggttgctgtcatgcccgtcgagttggagaaggcaaaggagccaccgctccacctgtacaaaccaaaggagccttacacggccacgatcgtctctgtcgagaggcttgtaggacccagagctcctggcgaaacatgccacgttgtcattgatcatggcggcaatgttccgtactgggaaggacagagttacggcgtcattcctcctgtaagcatctcctgcctagtcctgccaagcgtaatgataatgaatttatactttttcgtcctttcatctcactataccacaacaccaaattagcgtcggacgactatcgctataaatagagaattctcgtcgaactgtaactctggcaagtttgcactggacacttcatagtctgcagttcgtatgcttttttattgctatatgatcctttattgatcacttctgctctaaataagatagtattgttcagatatatatgctattgatattatggttaaatctcgtcagaaatttgtctgtatacagcagtgtatccagtatttccaattctgtgagtgttgatggtgtgacaaacagtgttaaaacctaactatggcttgtaaggcaggcccttgtcaaaaatttctgggaaattctagcttggttgctgttagcaaagcatataaaaacatgtaggtcattttgcgcagagaagattagttaacaccttttttgtgcagagaagactagctaacaggccttcttagactgtgactttagaagatctattttcttatcccttttagcagtactagtctagtgttattgactttctaccccctcgggctgtcctagctctctggtccaccttgaacctccttccttatttctgctcttgtacagtttttctctctactgtttctcgaacattgtcgagcttctctttattttaataaaaatttacagtggggggctcccctgctgtattttcggttcattttttactttttttatctgcacctgcttttactgtatctaataacatgttttttcacagactaacatataatttgttgtcaggaaangaatccaaaaaaaccgggatctcccaatactgttaggctctattcaatgctctactaggtat

SEQ ID NO: 4859 - DNA, 358 bp, Zea mays
gctcctctgccgactgcgcacggtgtgccggttgtggcggtccatcctctctgacccgcacttcgccgcggcccacgccatgcggcacccggggccgctcatcatcgccgccatcgatgagagacccgacgtgcacgtcaacatcatggatctgtcagggcaaatcttaaagcaggtgcgcggcgtgccgggtcagagagtcgtgagcacggccgcccttgacctcgtctttgtcaagaaaaccgatagcagcagcagcagctaccgattctgcaacccgtttagcggagacgtgcattacttaccagatcaattgctcaacccagcaactggagctgtgtatcaaataccaaacagc

SEQ ID NO: 4860 - DNA, 386 bp, Zea mays
tgatggggctggacatctcgaccgccggtgacatgtgggaccagctggtgtgggactacgacgaaacgttggtcacggaaccggaaggaggggaggaagggcaccagcagcaggacgatgtcatgtcagacctcttcttcctggacaatctctaggaggtgcgaggatagcatgggcatggctgccgtgatgctttatgctttttaatttgatccggtacttgtaggtttttgggtgtgttcagttcagagatgagtggcggtgtcagagacgagataaggggagtgctccagtgacatctttgtttgctggccggatctcacgaacccgtagaatggcaagaatgtagaaaaataagcacgcaatatcacttggaaacctttcat

SEQ ID NO: 4861 - DNA, 345 bp, Zea mays
ctgcttctgcttcatgaagacggccagcagcaagacccaacacggcggcggcagcggcaacaaggagggagcagcagcccaccagcagcagcgcaccggtaaactgcaaggaggaggagtagtggtaggcaaggccatggagatggtgtagcttaccatgcatctttgtccagtatcagctgcttatatatactagctagctattcttcttgcattaatattgtgcatgcgtgccttggggacaggttctttagtaatcttgtgtgctagctgcgtcgtttaatttctccagcactccagtagtccagtatctccctccaggctggctagtgaactactgctgta

SEQ ID NO: 4862 - DNA, 378 bp, Zea mays
atcttgggacgcaaggtgagctacaccccactgaggggaagccccagcaacgggaacctgtacgtcgtggatctcgtcgggctgggcctcggcggcccggacctcccgatcccgcccgccgccatcgccggagacgacaccatcctcgagctgcacacgacgttcacctacctcaagccccaggtgtacgcggtcctccgcgacagcttccgcaagtccatgtcggagtaccctgccgcgccgccgctcggaagcctggacacgtgctacaacttcaccgggttggacgctttctccgtgccggccgtgacgctcaagttcgccggcggggcagacgtcgacctctggatggatgaaatgatgtacttcaccgaccca

SEQ ID NO: 4863 - DNA, 397 bp, Zea mays
cttgtcaacaagccaaaccggaccgtgctaaatatccgggtctccttcagccgttaccagttcctcctcaagcctggcacacagtttcactagattttgttgaaggccttcctcgatctgggcatgcaaattgtattttggtggtcattgataaattctccaagtacggtcattttctacctttgttacatcctttcacggctgcaaaggttgctaaggtattcttggatcacatctacaaactacatggtttgcccactgtcctggtgtccgaccgagatcgtgtgttcaccatcacattttggcagacctttttttagctgttgggtacacaattgagtatgtcgtcctcataccgtccccaaaccgacggacaaactgagcgtttgaatcaatg

SEQ ID NO: 4864 - DNA, 370 bp, Zea mays
agcgtgtcctctcgaccagccaaccatggcgcccacagatggagacagaaaccagatccgtcgaaagagatgcttggccgccgtgccgatactgtgcattaattctgacaagacaagggccgcccgtctaaattgtctccctaactttctgatcggacggcggggagagccaaacaaacagggaaatggcacatgcgactccatgccatggccatagcagtaagcagcaatttgcatcggacagcgagttgcagccgaccacgccaaggtgaaggacgggtcactctggtcaccagaggggccaactgcacccagatctgctagtccacgcctctcgacacttgtccgagttattctacggctggataaa

SEQ ID NO: 4865 - DNA, 521 bp, Zea mays
ggggtttcagtagtaattcgcagagttctgttagcgccatgctgccaatgcgcatgccccgaggcatctcgcagcaagaacttgaactcgatcgacctgttcgccggcaaatcctggccagacgtaaacgatcgagtcaggctcacatggcccgggtcgctgaaggaacgcatgtgaccggagacctcaccgtgttcgccgtccagacgtggccttctgaccaaaccaaggagatcgccttagctggatcccaaagcccgagcgccgcgtcgtcgccggcgacgaggaactgctggccgaaggcgcactgcttcctcagcacgaacctgacgcgcactgtcttccttgcctcaggaactggcacggtcagattcacgaggcgtgccaacgttagtgtagtggttttttttgtcgtccgtgtaaaccacaccgctgacggctagagagctcataccgtgagcagcagcgggaggcaggttttcgacggaaacaatggagttcagatcatcctcatcctcacc

SEQ ID NO: 4866 - DNA, 412 bp, Zea mays
attgtagtagtgaggaagggaaagagagcagcatctcgacctctctttgttagagagtttgcattgcagctgcaggtggggggtcaactgcgaactcaaacacttgttcttggcttggttggtggtaatattaggagcgaggtgatggatcaactgttcttttattatctttctttctgttcagttcattgtggcaggaaccatcctttgcatttgtttctaaacaactcaatggttggagaccacatcagcatcgctggctatttttgctggatccaacacaactctttcttctgcctgttattatctgatctgctctgctgcattcgtttgtgcacctaccactaccagatggatacctcatagtttgaccagctcgctccttcctggctaccttgggtgttgtttatca

SEQ ID NO: 4867 - DNA, 1333 bp, Zea mays
  misc_feature (343)..(343): n is a, c, g, or t
  misc_feature (345)..(351): n is a, c, g, or t
  misc_feature (358)..(365): n is a, c, g, or t
  misc_feature (367)..(368): n is a, c, g, or t
  misc_feature (370)..(372): n is a, c, g, or t
  misc_feature (378)..(378): n is a, c, g, or t
  misc_feature (380)..(380): n is a, c, g, or t
  misc_feature (382)..(384): n is a, c, g, or t
  misc_feature (386)..(389): n is a, c, g, or t
  misc_feature (412)..(412): n is a, c, g, or t
  misc_feature (414)..(418): n is a, c, g, or t
  misc_feature (421)..(421): n is a, c, g, or t
  misc_feature (423)..(435): n is a, c, g, or t
  misc_feature (445)..(460): n is a, c, g, or t
  misc_feature (463)..(467): n is a, c, g, or t
  misc_feature (474)..(482): n is a, c, g, or t
  misc_feature (487)..(503): n is a, c, g, or t
  misc_feature (505)..(506): n is a, c, g, or t
  misc_feature (508)..(518): n is a, c, g, or t
  misc_feature (520)..(534): n is a, c, g, or t
  misc_feature (536)..(541): n is a, c, g, or t
  misc_feature (544)..(560): n is a, c, g, or t
  misc_feature (579)..(605): n is a, c, g, or t
  misc_feature (607)..(628): n is a, c, g, or t
  misc_feature (632)..(639): n is a, c, g, or t
  misc_feature (643)..(649): n is a, c, g, or t
  misc_feature (653)..(661): n is a, c, g, or t
  misc_feature (664)..(671): n is a, c, g, or t
  misc_feature (675)..(675): n is a, c, g, or t
  misc_feature (678)..(696): n is a, c, g, or t
  misc_feature (698)..(700): n is a, c, g, or t
  misc_feature (702)..(702): n is a, c, g, or t
  misc_feature (705)..(708): n is a, c, g, or t
  misc_feature (710)..(712): n is a, c, g, or t
  misc_feature (714)..(719): n is a, c, g, or t
  misc_feature (721)..(730): n is a, c, g, or t
  misc_feature (735)..(745): n is a, c, g, or t
  misc_feature (749)..(761): n is a, c, g, or t
  misc_feature (765)..(771): n is a, c, g, or t
  misc_feature (776)..(777): n is a, c, g, or t
  misc_feature (794)..(802): n is a, c, g, or t
  misc_feature (809)..(814): n is a, c, g, or t
  misc_feature (816)..(818): n is a, c, g, or t
  misc_feature (820)..(821): n is a, c, g, or t
  misc_feature (823)..(826): n is a, c, g, or t
  misc_feature (828)..(833): n is a, c, g, or t
  misc_feature (835)..(840): n is a, c, g, or t
  misc_feature (842)..(851): n is a, c, g, or t
  misc_feature (854)..(863): n is a, c, g, or t
  misc_feature (866)..(871): n is a, c, g, or t
  misc_feature (887)..(899): n is a, c, g, or t
  misc_feature (901)..(904): n is a, c, g, or t
  misc_feature (906)..(909): n is a, c, g, or t
  misc_feature (911)..(921): n is a, c, g, or t
  misc_feature (924)..(951): n is a, c, g, or t
  misc_feature (953)..(955): n is a, c, g, or t
  misc_feature (958)..(963): n is a, c, g, or t
  misc_feature (965)..(965): n is a, c, g, or t
  misc_feature (969)..(972): n is a, c, g, or t
  misc_feature (974)..(976): n is a, c, g, or t
  misc_feature (983)..(989): n is a, c, g, or t
  misc_feature (995)..(997): n is a, c, g, or t
  misc_feature (1004)..(1006): n is a, c, g, or t
  misc_feature (1011)..(1011): n is a, c, g, or t
  misc_feature (1016)..(1016): n is a, c, g, or t
  misc_feature (1018)..(1026): n is a, c, g, or t
  misc_feature (1030)..(1031): n is a, c, g, or t
  misc_feature (1033)..(1033): n is a, c, g, or t
  misc_feature (1035)..(1038): n is a, c, g, or t
  misc_feature (1040)..(1040): n is a, c, g, or t
  misc_feature (1045)..(1049): n is a, c, g, or t
  misc_feature (1053)..(1073): n is a, c, g, or t
  misc_feature (1079)..(1084): n is a, c, g, or t
  misc_feature (1086)..(1086): n is a, c, g, or t
  misc_feature (1099)..(1099): n is a, c, g, or t
  misc_feature (1103)..(1109): n is a, c, g, or t
  misc_feature (1117)..(1117): n is a, c, g, or t
  misc_feature (1119)..(1124): n is a, c, g, or t
  misc_feature (1130)..(1130): n is a, c, g, or t
  misc_feature (1132)..(1134): n is a, c, g, or t
  misc_feature (1136)..(1137): n is a, c, g, or t
  misc_feature (1139)..(1139): n is a, c, g, or t
  misc_feature (1141)..(1147): n is a, c, g, or t
  misc_feature (1149)..(1150): n is a, c, g, or t
  misc_feature (1152)..(1158): n is a, c, g, or t
  misc_feature (1160)..(1163): n is a, c, g, or t
  misc_feature (1171)..(1174): n is a, c, g, or t
  misc_feature (1177)..(1181): n is a, c, g, or t
  misc_feature (1183)..(1194): n is a, c, g, or t
  misc_feature (1198)..(1201): n is a, c, g, or t
  misc_feature (1206)..(1212): n is a, c, g, or t
  misc_feature (1214)..(1214): n is a, c, g, or t
  misc_feature (1228)..(1228): n is a, c, g, or t
  misc_feature (1230)..(1230): n is a, c, g, or t
  misc_feature (1232)..(1244): n is a, c, g, or t
  misc_feature (1247)..(1253): n is a, c, g, or t
  misc_feature (1255)..(1257): n is a, c, g, or t
  misc_feature (1262)..(1262): n is a, c, g, or t
  misc_feature (1265)..(1271): n is a, c, g, or t
  misc_feature (1274)..(1281): n is a, c, g, or t
  misc_feature (1287)..(1299): n is a, c, g, or t
  misc_feature (1301)..(1301): n is a, c, g, or t
  misc_feature (1303)..(1303): n is a, c, g, or t
  misc_feature (1308)..(1308): n is a, c, g, or t
  misc_feature (1310)..(1311): n is a, c, g, or t
  misc_feature (1320)..(1321): n is a, c, g, or t
  misc_feature (1323)..(1325): n is a, c, g, or t
  misc_feature (1327)..(1327): n is a, c, g, or t
  misc_feature (1329)..(1329): n is a, c, g, or t
agagctgtgcctagcaaataaataaccacatagcagcaggagctgctgtggagacaccatgacaaacggcggccatggcaacaactgacctgggtggcacgataccatttcgggagccagcaggcaatgccgccttgtggcctgttcgcgatgtgcagcgtgggctggccggacgcgggcgagcactgagtcagccgcaagaggacaccacgggttcctgggtgccggtgcccgacggcccctctgccccatcctcatctccagcatccaccatgatcgttctttttttctgaagaagttggaactgattggggggggggggggggggggggggggggcgatntnnnnnnncccctcnnnnnnnncnncnnnatggcntngnnncnnnnttagactgatctacaacctcaancnnnnnttncnnnnnnnnnnnnnggggggtaannnnnnnnnnnnnnnnagnnnnntttcttnnnnnnnnntttcnnnnnnnnnnnnnnnnncnngnnnnnnnnnnncnnnnnnnnnnnnnnnannnnnnacnnnnnnnnnnnnnnnnntttgataatatatcccctnnnnnnnnnnnnnnnnnnnnnnnnnnncnnnnnnnnnnnnnnnnnnnnnnctcnnnnnnnntctnnnnnnntctnnnnnnnnncgnnnnnnnnccgnccnnnnnnnnnnnnnnnnnnntnnnancannnntnnngnnnnnncnnnnnnnnnnctccnnnnnnnnnnncctnnnnnnnnnnnnnctcnnnnnnncttcnncctctgattctcccctnnnnnnnnntcgcccnnnnnncnnngnnannnncnnnnnncnnnnnncnnnnnnnnnnccnnnnnnnnnntcnnnnnntcctctctctcctccnnnnnnnnnnnnncnnnncnnnncnnnnnnnnnnnctnnnnnnnnnnnnnnnnnnnnnnnnnnnntnnncannnnnncntccnnnncnnncaccccnnnnnnnccctcnnnccacccnnntcttnctcancnnnnnnnnncctnntncnnnntngtccnnnnnttcnnnnnnnnnnnnnnnnnnnnnttccannnnnncnccactcctctccnctcnnnnnnncccctccncnnnnnntccctncnnncnncncnnnnnnntnntnnnnnnncnnnnctcccctnnnnccnnnnnannnnnnnnnnnncccnnnncatcnnnnnnncnaccccatccccatncncnnnnnnnnnnnnnttnnnnnnntnnncctcnatnnnnnnnctnnnnnnnngcctannnnnnnnnnnnnanantcttncnntccaatccnntnnnantngctt

SEQ ID NO: 4868 - DNA, 573 bp, Zea mays
acatgggttaatgcagtacactcgctccgtcctcgtcatacataacatcgcccaccaggtcgtttccttctcctaatcatgaacctgctgagccattgctattttttcctaacgatattaaaatggttcgatactgatcgtggcacattgatttgtgttggtcaattgtttcttttagatttttctgtcaaacattcatgctcatgcagaagtgaatgtcctgcgtccgttctgacggcttccctcttgtttgcagggccgtggtcctgtagatgaattcccgtacatggacttgcctgaacactaccttcaacatttcgagctgtacgatcccgtcggtggcgagcacgccaacatctttgccgcgggtctgaagatggcagaccgggtggtgactgtcagccgcggctacctgtgggagctgaagacagtggaaggcggctggggcctccacgacatcatccgttctaacgactggaagatcaatggcatcgtgaacggcatcgaccaccaggagtggaaccccaaggtggacgtgcacctgcggtcggacggctacaccaactactccct

SEQ ID NO: 4869 - DNA, 421 bp, Zea mays
gtcgaccctagttttttggtaagacacttgttgtaagggcactcataggggcatgctctcaaggtaacagaagaattgcttattttgctcgaaaaggtgctgattgtttgggtaagtatgttggtgatgctgagagacagttaagacttcttttccaggtagctgaacgatgccagccttctatcatattttttgatgagatagatggtttagcaccttgtagatccagacaacaagaccaaacacataattcagttgtggcaaccttgctctcgttgcttgatggtttgaaatcacgaggctcagtcgtagtgattggggctacaaatcgtcctgatgctattgatcctgcccttaggagaccaggaaggtttgatcgtgagatatactttccactaccaaccttcgaggatagatctgc

SEQ ID NO: 4870 - DNA, 601 bp, Zea mays
tctgccgatggttcaccggttccattatcatctccccctgaccctagggtgcctgattgaaccaattgaaattgatcgtcaacccaagtaggaaactctctgaatgagtttgtacgtggatcgacagctttcttaaactttcctatgcgtatctcatacatgttacgcacatcaatgatgacctgtcacattaatagcgtaaacaattcgcaggcaatggaaaagaagttcaacaatgcaaagatagatgacgagttatgaactatctgagatagatgaaacacttacagtgtctggatcacttatcaagtcattccagtcttttggcttaacatatttcccaacgattttagttggcataacacctgggtctccaaacgtcactatctacaaaatggccaaggagcagactaagctggaccgtttcatcattaaatatccagtgaccaaccaacaagaaccatgcaggcaaactaacctcctttttcaatttgacacggacatgatcccatcggaatggtgcatcttccccagcaccaacaggggagtgactggtatgtccatgatgtatggcctcatcctctggagtaacaggtgactg

SEQ ID NO: 4871 - DNA, 475 bp, Zea mays
ctcgcggacaatggcttcaccggatccataccgccggagctcggtgacctgccggtgctcaactaccttgacctctccggcaacgagcttagcggcgaggtgccgatgcagctggagaacctgaagctgaaccagttcaatgtgtccaacaaccagctgcgtggcccgctgccgccgcagtatgccacggagacgtaccgcagcagcttcttgggcaaccctgggctttgtggagagatcgccggtctatgtgccgactcggaggggggaaggctgtcaagaaggtaccgtggctcaggctttgcctggatgatgcgctccatcttcatgtttgcagctgccatcctggtcgccggagtggcgtggttctactggcggtaccggagcttcagcaaatcgaagctgcgcgtggaccgctcgaaatggacattgacgtctttccacaagctctcattcagcgagtacgagatcctta

SEQ ID NO: 4872 - DNA, 406 bp, Zea mays
atcgcggtgtcgatcttcccaacacacgacgagcacgagtccactcattttgccgaactgggagctgcaggggcgcacggccagtgagcacggtgaagcgacggcagcgcagatcgagctcgcggcgcggcatgacatccatggacgcgagctagatgtcggacatggagatgaaggctcaacggcgcacggcaaggtcaatgacgcgctgtggatatggaggagtctgcaggggttcatggtcggaccggcgactggccgacgaacttgatttggcagtaggcgatggctaggacgtgggggagccgggactacagtgctagccaccagcgagctttgatggcttgccgtagctgagaggagcacgtagctagtagaggtgctgtgtagagaagggagaaactgg

SEQ ID NO: 4873 - DNA, 366 bp, Zea mays
gctactcgttggtcgctagctcgatcgtgtagcagcagtgtggtaacggtgtggtacgtagtagtagtagtacaacggagagaagggatcgcaagggacgggacggacggaccaagttgcacgtcgccgtcgcggtgtttattgcatgcatgcatggggccccggccggttgcagcatgcgctgcttcccatcccagtcccagtcccagcgcgtgggctcccacacgtgccgtgcctgtgcctgtgcctgtgcctgtgcctgtgcctgtgcctgtgcccgacgtcacaagcaaccacctctctctttcttccctcgctgggcagttgcggcgcgggtactctctcttaccctcaggcacacgtaca

SEQ ID NO: 4874 - DNA, 436 bp, Zea mays
ctatagagcaaggtgaggatggcatctctttatcagatgaggataatatggtggaactatatacaagtgatcaactgagagcaaccctggatgatcatgctgcagcaaatcaaaaggtggtggagcaagaaggtgacattgttgaaagggttgtgaccacagatggtatttctattgaagactatgagaaggaagtagagcaatctactggtgacgaatcaaggtcaaccaagggtgtgaactttgtggaagataacgagaatgtggatccagaagatgtgatcaacatacaaggtgtaatcaatgatgacagttgtgtggaggcacaagaggagggcatggtggttgcggagcaaggtggcgatgccatgcatgcaggagatgagggtaatgtggtggagcaatgcaccaatgatcagctgagagcaaacatgaa

SEQ ID NO: 4875 - DNA, 373 bp, Zea mays
gggtcgttggcgtcgtcctccgaagcaggttctgcgtcacgacccagcacaccgcaaccaacagcacacatgcgctccgactctgggctaccagcagcagcaggcaccaccagcgctagctcttcttctccatccacctgagcaagccgtgagctcagcagctcctctgccgacggtctcgcctcaccagtaacaaccaaaggggtcgcaggaggtaacagagcatcgctcaggctcagccgctcacgcccgggtccaaccgccaggggctgccctacgccggcctccgaaacggactgcaccagcacttgctccatgcggcacttgaacagcgaggtggcctcgctcatggagccttcttctccttcttcat

SEQ ID NO: 4876 - DNA, 694 bp, Zea mays
  misc_feature (409)..(412): n is a, c, g, or t
  misc_feature (416)..(417): n is a, c, g, or t
  misc_feature (419)..(419): n is a, c, g, or t
  misc_feature (564)..(568): n is a, c, g, or t
  misc_feature (599)..(603): n is a, c, g, or t
  misc_feature (623)..(627): n is a, c, g, or t
  misc_feature (633)..(639): n is a, c, g, or t
  misc_feature (644)..(649): n is a, c, g, or t
  misc_feature (656)..(667): n is a, c, g, or t
  misc_feature (669)..(672): n is a, c, g, or t
  misc_feature (677)..(679): n is a, c, g, or t
  misc_feature (681)..(683): n is a, c, g, or t
cagctggagccacatcactggaggtgccagcaagcctcacaaggggaatgatcctagatggaaggcaattcatgctgtacgaactcgtgatagcgtgcttggaatgagccattttagactactaaagcgtcttggttgtggtgatattggcagtgtttacctctcagaattaagtggaactcggtgctactttgcaatgaaggtaatggacaaggcatccttggcaagtaggaaaaagttaaatagggctcaaactgaaagggagattctacagcttcttgaccacccattcctcccaacgttgtatacacattttgaaaccgacaggttctcttgtttggtgatggaattctgtccaggtggtgatctgcatactttgcgacagagacaaccaggaaagcatttcatnnnnaccnnanaggagatgctgtcggtttcaaaatgtgtataccacgttgggaggaatgggtggtcaagaagctgtagaatctccctttcagtttgagccctatttaactttttcctacttgccaaggatgccttgtccattaccttcattgcagnnnnnccgagttccaccttaattctgagaggtaaannnnncccatatcaccacacccaannnnncttttnnnnnnntaaannnnnncattcannnnnnnnnnnncnnnncctannncnnnaattgcctttc

SEQ ID NO: 4877 - DNA, 1400 bp, Zea mays
  misc_feature (1335)..(1344): n is a, c, g, or t
acactttgtgtttaactctgtgtgcatcaagatctagatttgtacatataattgtttggccctgttttgtcctacatatatttgaatgttagcagaactgccttgtccctgctcatccaagagaaagcctacttttgggggctggtcaatcagcttccctcattacttttagattacatatgatagtttgtggaatagaagttatttctcataaggatattaaacttgaataatatttgctggttgccactagggagaggataatattgtagtctcatgtgtttgacgtctttagaactaggtctaaagctatctttcctttcctagttttgttcaagttgtgtttgacgtctttagaactaggtctaaagctatatttcctttcctagttttgttcaagtcctgtttggtgagtgtggccctgtttggatatgatctttccgaccacgaggtgtggtagcggtgccgcggccatggagctgcgactgcgatacgtaaaatcaagctccccagtaaaactcgtggtggttaagtcacgtactcacgtgcggtggaaagaatcataggaacctcagaccgtttagtgtgattcttcccgattcttgtggccagccatcggattataatcgtattgaaacaggccctatattttggatgaatattgatgaagtttttactcaagcaagtgttttatgttttgtacatctactctttcgttgatgtcgacaggctctggttggcctagctgaagaggttgctaattttgatgttccgttagggtctaggaagataaacggaaaatatattcaatctcatcttctctccagattagaaggtaagtggcagcagtgagcacgcaatgcttcaggttgaatcattattgcaggttgaatcattattggagaactcggtgacattattatatttgctctcctgcagctgtccatgataagattatggaacaggtaaagagtgttgacgctttaaagacccaagaaattcctgtctactggattggcatggctgaggtaaacatctgttgagttgttatgaggaacaaaaggttatttttgcagcaatatataaatcatttccaacctggcattacactgtcatgtgtctgctctgctattgcctccatggccgctttctctagttcttacatctctgtcgatgtgtgtttccgcatcagaatgtgcagatcatgggttcattcgatggatggtcacagggcgaggcgatgtccatggagtattcaggtgactacggaagattctctgcgactctgaagctaagacatggaaggttagtttttactagtttttacatgctggnnnnnnnnnnttcttcacgtaaataaactcgctgtgtggccccccaaggaaggtacgagatcaagt

SEQ ID NO: 4878 - DNA, 381 bp, Zea mays
ctgccaaatatgatcacatatagctcggtgattgatggactctgtaaggagcacatgctgagtgaggcaatggagatcttggaccggatgcgactacaggggaggaagcctgatgctgggttgtttgggaagctaattgttgggctatgtgatgcaggaagggctgtggaagctgcaaattacctggatgagatggttcttgccggtattgaaccaaaccgggtgacttggagcttgcatgccaggataaacaataccgtgctgacagcattatgtgataagggtgaacttggcagggcttttcaggtctaccagagcacaaggactcgtagtatttctaccgacccaaccactttccatcttcttgttgagagcttctcc

SEQ ID NO: 4879 - DNA, 603 bp, Zea mays
gaaagtttttcccttgagcaacaactctccgcaaaagtgggtatatcccctgagcaggaaactgattgtgcacagcaggaggctattgatttgaaatctaaacttcagtccaaggttcttttactaatcctgttcttttactttgtgtattcgagaccctggtgcagtatacctacgtgtaaaatttggcatactctggaacatggaattattcatggtttgtgctacaccttttatggatttttagttgataggaatagtttgcatgttctttagatggctataagcaactatttgtgttttatgcttgccttgctgacatttaagttaatcaactttgctgatgtactttggaaggaagctgaattcgaaaagctgaaattcgagcatctgaaaattactgaggaacagtgcgacttgatcaatcaaaaccataaattaagtgaggaagctgcatatgcaaaagaattggcatcttcggctgctgttgaactcaagaatttggctgaagaagttacaaagctatctgtactaaatgtgaagcaagcaaaggagttactagttgctcaggagatggcacattcaagggttcatggtagaaag

SEQ ID NO: 4880 - DNA, 1097 bp, Zea mays
  misc_feature (51)..(56): n is a, c, g, or t
  misc_feature (1030)..(1033): n is a, c, g, or t
  misc_feature (1036)..(1036): n is a, c, g, or t
gcatggaaaggtatcgtcctgcaaaattgaataaggaaatctaagattcannnnnntatgtttctccggagcatgcaggttaccaacatacactgcataccaagatcagtaaggttctcatttccatctaatgctccaatcatcttcaagaattccactgcattctcgacctacgtgtttatcaagtgtaagtggaaataattcaaaatcaaaagaaggatcttttgctacctacttaaaaaatgtatatgatgtgcacatgcaacatgctagaaaaaaaaatcggttaatatgacactatatccaacaaagacacaaaggcaatgagaaaaagggaatatggaaatgccaaagtatgatttaaacacatacagctcgtggttctggaggctgtagagcagctgataggaactccccaatgcttccaacttgcaaactttttatctgcagacataatgaattcaaaggagttctaagaagctctggaagctgatagtctgcaaatgcatcatacacacatctagggtacagatggtagcattctccaggttgcacacggccagctctacccctcctctgcattaagacaatggatactatgagaattgccgcgaatcacaaagatggatagatggtactgtaaacaaagtggccaagtgtgataatatatgtgccaagaggttatgttcaaatttggctcgttgggatttctttcaattgttattgttggtcttttctaattgtaaccagtcaatactaaaacagaccaaaaagataccttatgaaaggtttgagagagagagagagagagaagcacatggaagggttaatagagttaaggactaatgcaattaaacaaacataaataaccccagatgtcagctgaataaataggtcttttgacctttggttttgccaatggaacaaagttcttttagtcaggaattgggattataattgaacagaagtctcataattgagtcaaacaaaagatctaccggtgaaagatgaaacaagcaaacagaagctnnnnatnacctgacgggcagaagctttcgaaatccatgaggggagtaagcatggagtatgttagagca

SEQ ID NO: 4881 - DNA, 405 bp, Zea mays
catggatccagacttccaaagttggaatctgatcactcgcgtcagtgcttctcagctcccttgtttgccgttatggaggagcagaactcgtggctcaggaccaagttctccaatactgtctatgctagggtggatccccggagagtacctgttgctccgcttagcaaggatgttgagcggaaactgcacaaattcttcaagatgaagaagactgtatcgatgcctgttgatcgggatgatggagacacagggactgcattcaagcactgtgctagcttgccgctagttcgatcccagcctcagcttgacagggaaaaggtcaacaagcccgagagggcgagcctggagattccttcaagctcccagatgaactcagagagttgcaagattttttttttttttttt

SEQ ID NO: 4882 - DNA, 456 bp, Zea mays
cgggctgatggcggtggcgctggtgctcctgggcacctggccggttgtcctggcggtgctggagcgccggggccggctgccgcagcacacgttccttgacttctccgccaccaactttatggccgccgtgctgatcgccctcaccttcggccagatcggccccgccaacagcacgcccaacttcctgacgcagctcactcaggtagttttcatttcagttctgtctgcctacccccgtcctgtcgtcaccaacaaccaagcaaggacatcttatcttattattagttcaagaacaactgggcttcggtcttgtttgccatggcgggcggcgtcaccctgagcctgggcacattggccacgcagtacggctgggcgttcgtcgggctctccgtcactgaagtcatggcctctagcctcaaggtcgtcatagggacaacggtcaactatttcctggac

SEQ ID NO: 4883 - DNA, 669 bp, Zea mays
tcctccgaccattctgctcgcccgacaacttgtcacaactgggtctgctccatcggctcctcgtccggctttaacatcaccgtggccagcagccacttcaaattcgtgagcgcccaacgccgccccctggttcactccctccgtacgcacatcgcccttgtccccggtccatgtagcgtgtctctacgctctgcgtcgtcctcgccgtcattatttttggagttcgtcgtaacgcgctgccgatggtctgcgtatagcgggagatcttcgcaagtttacgcagctttgtggtaattaattttgatggcgatctacgttacttagcgctatgtttgttttctttatgtgtttgtgtgtaggttcattccctacggggcatcacagtttgcgctaagcacgattgattccatctagttcacttgcactccaggtgtttgatgaatcatctgaaccgggactcgttgtcgtttccacgacttctgagtcaatttagtattagtgagccggtttgttaattctctagctagtttgatgtatgaatgtgttcgatatatttattggtttagtatattaattgcgatagtttttgtgtcatggtgcagatgtgtcgtgattgtattagatgtttgctaatgtctcatatatgagatgtatgttcgaattggtgac

SEQ ID NO: 4884 - DNA, 900 bp, Zea mays
  misc_feature (842)..(844): n is a, c, g, or t
  misc_feature (848)..(848): n is a, c, g, or t
atgtttacacagctacaacagggtgcctagcctggggtaacgaactaattgacatgcatgagttgcaaacaggggcatatactctaaacctgaagcttcctgcttctgaattgcgtaagtaatgtcgattatctcaaaaaagtgtcactcagttcacgtttctgtatttaccacctgtaaaacattatgtttatgccagttcctgatgtctcttgatgagcaggaggacatcacccaatttggaaaatagccacgataatatcagccatagtgttatttgttttggctgcttgccttcttctgtggtggaagcatggtagaaatattaaaggtaagattccactgtacacatcattcatgttatttatcgctcacaagtgttcaagtgactgtggtttgggcttttggcaatagttgtgattatactgcgtttcgtcggcttggtttttactaatactattagaaacattagtgatttcaaaaaacaaactagtgtttaaggtttggagtgaacccatctttttcatggtttttaaataaccataatgattccatgaattttgttatgtgggaaaacattgcagacatgaggtattctctagccaaggtcacataaatcataaatttttacttataagttcattgaaactatcctccaatgattgagtgataaaagttttactcatcaccataatgatcgctaaagaaaggtgtgaatagacagttcaatgtgaattcttagaacagcagtatttataatgttaattaccattctgaagcagatgcagtgcacggaagttggagatcaaggcattcgtctacccaatcccagcagaatagtnnnatgntggacatctcgcagtcaattcgttttgatgatgatgtggaggatggaaaaag

SEQ ID NO: 4885 - DNA, 375 bp, Zea mays
aggctcgccagcaagctggcagccgtaagccaccgagcggaggcgaagagggaggccgcggaggcgaggcggaaccaggaagccgcgaggacggaggagcaggcggcccggatccgatacaccgggcatacgccttcgtccttctcctgctggtgctggtgcccgtgattttgacggatcttttccgccaagtcacccagcatggacagtggtagaaaaattccaacggttctttctttccccatgcatgaacatggagaaggaaaccttcccgttatcgcgtcgtcgtcactcacgcggttgcatggagtggactggccactggggtagtagggtggcgccacctgtcctcgtccaccttccacccctctcgcc

SEQ ID NO: 4886 - DNA, 655 bp, Zea mays
tctcctgatcagatcagatgtgaatgtacagtgcgtaaccctggactatatatgtgaatttgcaggggtgctcacaggctgcggaaagcagaagatcggcgcggccgttaatctcggagcgttctacttgctaggcatcccagtggctgtactgcttgcattcgtcttccatctcaacggaatggtactgcaatgacacctctgctaacttgcacatagttttttggtactgcaatgatacctctgctaactctggaaacactaccactgttctgttctctcgccagggcctctggcttggcatcgtctgcggcagcgccaccaagctggggtttcttctgtttgtaacgtgttccgtagactgggacaaggaggtaagtagaaggcatattcagtttctctctctctctctctctcttggttcactccagagtatgggctagtcaatgtgatatgtatatccttttttttaatttgtcctctcatatttcaggcagtgaaggcaaggtacagagtgttagggtcatctctcccgttagcatgaaaaaaatgccagtgttacatggaaatcccatttgaaggcagttgaacagaacccggcaaagaaagcgtgggaaaaaaactttctatagttggggacatctcaaaatcatag

SEQ ID NO: 4887 - DNA, 361 bp, Zea mays
cgttgaattctgcccggcgcgcgggggcttgcgggtgcgcaccggaggctgcatcttttcccggccaagattcggtccggtggggccgttcttggcacgatttcacgggccgtttggccttccctcgccggatttgttcggttccaggcaccaaattccaatcttttcctgctgctgctgcctctgcgacactttattcttctcccccaattagcggcggttagtgtggattctgatttgtaggttcctttcctggtttcctccgtgagcttctgcggttggcgtggttacgccagtccctcgcgatttacatctgtgattcgtttgaaaatctgggagtgtggagatttgggaggtcttc

SEQ ID NO: 4888 - DNA, 505 bp, Zea mays
ttctgcatctgtcagattttttgaaccaatgactaaggtccgtaaaccctctgatgaataggctgacaaatgatcttctgtagcttctctaattttaacatgcaacgaatcataaagttcatcatcaatttctactttcaaaatgtttaacattgatgtgtcagcacctttcacaagaaccttcacattgttgtccggaaaccttacaataacagacattctttttctcacactatcgaattcatggagaccaagaacatccaacctgattatgacaatgtaagattggtaagtaaatatacactctaaaaatataggtgcaaaatgaattcgttggaactgataccagcattggctacagctttgtcaaggaactcagagggtttcagggttgcagtatttaccttaacctctcgcctagaacatctataacaatgtgtccagttgttctttcaacaagggtatacccataagcagacgctgcaattactaaagcctgctcata

SEQ ID NO: 4889 - DNA, 450 bp, Zea mays
gatcaaccagagggaagatttctcattcgcgcttttctcaggtggtctctcaaaggtaattctgaaagaaaaaaaagacagtaccttttagactcgtctgcttttcccatctgatgaacaaaaaacaaaacactcctgtaccagcccaagctgatttctgtctccaacaaggtagcctttgctaatccaaaggcaccagtgtacccgcgtttggcgcaagggaagtcttggaatgaagtaagccttcttgccattcgacaaaaagatcgtaggagtagtattctgctctgaactcaactttgtatcagaacgggagaagatcgcattgtggagataacttaactgtagacgaccagtagtcaccaatctaagaatggcgactatattattattgttttttttcgtagatgacagtcacctggacaagcggctacgatattacaaaagcag

SEQ ID NO: 4890 - DNA, 459 bp, Zea mays
cacagatctccaaaaactttgtggcctcaaatcaattggagtagtgaattcccactcccttatctgttatcttctttcttgccagggtttggtgcaggatcctcgcgttccagggcagctgttgccagggctgctccagcaatcaacaattctcagactcttgataatgctcctccacatcctgctgatggagatgcccctccacatgctgccgatggaggtgctcctccacatgctgcagatggagatgctcctccaatgaacaatgaagaaattgcaaaccaagatgaaattatgattggtgaagtagctgtagatgatgaagatgaagacgcaaactctcatccagttccagccagggatgcgtcgatggaaagtgagcttgccaatgaactgaagggggatgccttggatgactacgatattgatgtcagtaacgaaggacaggctatcgcagag

SEQ ID NO: 4891 - DNA, 454 bp, Zea mays
  misc_feature (396)..(397): n is a, c, g, or t
  misc_feature (434)..(442): n is a, c, g, or t
  misc_feature (447)..(447): n is a, c, g, or t
tacttctggatgaaaccatgacgtccaaggtgtccgacttcggagcttccagatacatccccatggataggacagggctgacgacaatggttcagggaacgattggatacctggacccgatgtacttctacacgggacgcctcacggagaaaagtgacgtgtatagctttggcgtcattctcgtggaactgctaacaaggaagaagccgttctcgtacttcttcctcgacggagatggcctcgtctcactttttgtcaacctgcttgctaaagaaaatctggcccaaatactcgatccccaagtcgtagacgagggaggcaaagaagtcgtccatcaagtctccatgcttgcggccgcatgtataaagctaaacgctgaggaccgatttttttttnntcttgtttttgatctgaagggggatgcctaggatgannnnnnnnngggtntcattaa

SEQ ID NO: 4892 - DNA, 392 bp, Zea mays
tcgcttcgtcggcaccgtcccgccgggtctcggttcactgacgaggcttcagacgctgtggttggcggccaaccggttcgtcccggccgagttgccggcgtcgttcaagaacctcaccagcatagtcagcctctgggcatcacagtgcaacctcaccggcggcttcccgagctatgcgctggagatggaggagctggaggtgctggacctgtccaataacatgttgaccggaagcatacctgcgggtgtttggagcctgaagaacttgcagcaattgtttttgtacgacaacaacttctccggcgacgtggtgattaatgacttcgccgcgacgagcttgacgcacatcgacctttcagagaattataaacttacaggacccatccctgaag

SEQ ID NO: 4893 - DNA, 491 bp, Zea mays
ttacattcaggtttgctttactgcctgcaggatgcgttcggatggtttatgctctcgaataaaaaaaacagaggccttggagaatgtactgcatatacggtatcgccagtcttttttagacattttagttgcgccttggtacagttgtacatagtacatgtgcgtcgagcttcaaaattctggtttccattattgcagagcactgttgttccgtgtttcaggcgtagaacagctaaaaaccgggcatacagagagcctgcaagaataacagtgaccctcttggccttggagcatgcggagaatagcttgaccccggtcactggaaactgcgccgtctgcccccaccgcgcgaatcattgtacgtcgtcgtcctgattccgtcgacaggaacaggcgggtgatcgcttgtgaatgttgtttctgctcttgatgacatgggtgccgctcgctctctgccgtgcgtgaggggaagctgcgacataagcctagtt

SEQ ID NO: 4894 - DNA, 470 bp, Zea mays
cgaagatcctggagtgaagagcgaatcttgttccggctcgtcaccagaggctaagagcggcagtctggatgactgggaaatcagaaggtgtggggctatggctgcaaggcttctgaaggatgtgaaactgtaaacatgaatcctagagatcgtttcccccccttggcagagaactctagagctcctttatgttgttgtccttgatagttgttgtactgcccatggcagtctatgttattgtatcttattgcatcagtggatattgataccattccaaaagaaaaaggaagtctctctatctctctctctgatagatgtcaggacagcacggctaatgagtcaggtaacgagttcaattgttctgaaactggctgctctagttgtcttatatataaaaacaaattttgtggttacagataagaggggctcttgcttgcaccggcgcctggcggtagaaacaaggtaaatga

SEQ ID NO: 4895 - DNA, 529 bp, Zea mays
caaggcaagcagcagagggaggccaagtgactgagctccgtacgtgtctccttcctccaggttcctctctgggctgccatggatttgctcagcagaggggcggcggtgttgaaggccctggtgttcctctgcttcatcagatcgtctcaaggtatatatatatatatatattccgacttggacattactggatcatctatatatccagtttttttttcttttcttagtcctcaagtggcacatatatacatcacacaagctgctgaatttgcaggaggagatctgaatctccctcccttggtgaaggcaagcaggttccccaggttccaaagcgaggcatacgactacatcattgtcggcggcggcacggccgggtgcccgctggcggccacgctgtcccacaagtacaaggttctcctgctggagcgaggtgggtctccatacggcaaccgcaacatcacgttgctggagaacttccacatttgcctggccgacgtttcaccgcagtcaccgtcacaagctttcatct

SEQ ID NO: 4896 - DNA, 406 bp, Zea mays
aatgttctctaatgcccaagacaccgggaaagtggtggaggagctgaagaaggcgacggaggacgagatgtgcaagcccgcgcttgccgatgatgatgttgtcgccacacaggtccagggagagaactcgctcttagagtgaagcacggagcgttaggctcttcggctggctatgggcacggtgtgtgcccacctctctcctctgacaccgatcatggttcgtctgatcaattggctgcatgcgatgccctgccacgtggagcgcgtcgtcatcgaaggtgcgttccactggagcagcatggccattgggcagatggtctccaacttcgatgagattgatgccactgtgatcgtggagggctttgctgctggccatagcgatgaggagttggatgacattgaagaa

SEQ ID NO: 4897 - DNA, 364 bp, Zea mays
cgtggtgttcggcggggtccgaatcgtcgagacgctcgaggccgtgccggaggaagaggtgcggaggatgcggcagcgcgtgctggaggtggcgccgagggtggtgtaccggcggcacgggagcacgcccgagctgagagaggccgtgaaggatgccgtcgacctcgctgtggatggcgtgctgcagaggattcggtggcggacgcgtgcactggaggacggaccgccggagaggatttacgcgcaagaggaggacagcgtcgacagatagaggatgaggaccattcccttcggctgcaacaggacatccacatccaatagtgaaatacagtgtgtacatgttgctgttgtagtggagaaatga

SEQ ID NO: 4898 - DNA, 1254 bp, Zea mays
  misc_feature (60)..(60): n is a, c, g, or t
  misc_feature (199)..(199): n is a, c, g, or t
  misc_feature (304)..(304): n is a, c, g, or t
  misc_feature (324)..(326): n is a, c, g, or t
  misc_feature (333)..(335): n is a, c, g, or t
  misc_feature (342)..(342): n is a, c, g, or t
  misc_feature (380)..(383): n is a, c, g, or t
  misc_feature (411)..(417): n is a, c, g, or t
  misc_feature (426)..(438): n is a, c, g, or t
  misc_feature (458)..(458): n is a, c, g, or t
  misc_feature (1166)..(1172): n is a, c, g, or t
  misc_feature (1203)..(1215): n is a, c, g, or t
tgtttgattctggcgctgagtttattttggggttctgggtgtgatttggcgggggtaccngatatcaatggcgatgcgctgcacgcgagcctggggctgcctcccgcgctcgccgtcaacacagcgcgtgtcgggaagctccagatcacggtaagtaagatgtcgccactctcccgctcgtagctctctgtattttagntgccttgctgtttttccacacgaggagtcggggattatgggccgcattggtggcagattcttgcccatgttgcagtcgatttgctaacgtttgatatgttccggngaattttgttttactctagnnncacttcnnnggcagtncaagcagtaattgcgttagacttgtgactgactgtcgnnnngatggattatcatctcatctaagcaaannnnnnntgtatattnnnnnnnnnnnnnatgtgatggttctacaaagntattctttgtatttagttctgcatccatgttacatttgctgcacttgtgttaatttttgacctgtttttaaaatcatggaatggaatttacagttagaaatgaggtgtttagtattttttctagtttggatgttttacagttatgtagtggccagggggtcgcctcggctagattttgacacttggtgctcaatttgcaatccttaggcctcacagtgtggttaataaccttgcttttgttagttttggtaacggatttcttctgttcaccactgcagttaccatctctatcaaatgtgcaagtagagccaattgaggtgaacattgacaagctcgatctcgtgcttgtagagaaggacgattctgaaaatctttccagccctagcaggtgcatttcatgtctttatgttgcgatttaaaactaccgtgtgagcattctgtaatcgtacttctatctattacctttttagcactgcatcatctccatcagcaactaagagcagtggatatggttacgctgacaaggtatgtttccttgcgctaaatgtttagcacacacgctttccacatatttatgcatgtacaatgtcctgatgcttgctctgtgataactgattactggaatgccagctccatgatagctgaaattcaacttacccgttttctctgtgattatacctcttctctgatattctgccattttactannnnnnntgttttagactatatagatactttgagtaannnnnnnnnnnnnagaactgaacttaaccttatatgtcgggcttagatgcag

SEQ ID NO: 4899 - DNA, 433 bp, Zea mays
gtcatacgaatgcatatggagcaagctgctgcaaggtttgatgcagagtgttgtgtgcttcgaatggctcggcatcgcaacctgataaggatactgaacacctgttccaacctggacttcagagcgctggtgctccagtacatgcccaacgggagcttagaggagctcttgcgctccgacggaggaagaggaatgcgactagggttcgttgagaggctggacatcgtgctagatgtgtccatggcaatggagtatctgcaccacgagcactgcgaggtggtcctacactgcgacttgaagcctagcaacgtgctgtttgatgaggacatgaccgcgcatgtggcggattttggcattgcgaggatcttgcttgatgatgagaactccatgatctccgcgagcatgcctggaacaattggatacatggcaccag

SEQ ID NO: 4900 - DNA, 701 bp, Zea mays
cttgtagccgtcgtccagcacatccacgtcgctccttgtctggaagcagaacctcggttccctcatcttcctcctcaccttcatccgtcctcctttctcccccgctgctgccgccgccgggcccttccacctgcgtgctcagctcatcatatcaacagatgtagatgtgttcccaatcagatcatcagcgcgaacgaacgagccccgcgccgcgcactagaaaccctaacaatcggtcaaccacactacgtactccactattgctcccagcaactcccaagcgcgcaagaagcaacaagtgagttatggtgtgaggccataatcgtcatacgtacgtaccaattgcaggaacttgggctgttgcatgcggtggcggcggtactagcgatctcgccggtggctttcgccgccgccgagctggtgcccgcctgcgaaaaccaagattacaaggatcaaggagagcatcccaccaggaccaggtggtatggtcttctcgcagcaggacgggatggagtcgtcggctcgtcgctagcttcatttacctcgccggcatcgagcgccccggagccggtggtggtagtcttctcgcagacggcggcgacggcggcggaggggcagaaagggatgccgggaagaagcagcgggtacaggaggccgctgtggtggtggtggtccgaagagagcatcaggccaatgattat

SEQ ID NO: 4901 - DNA, 396 bp, Zea mays
gggtggcaggcaaatgagttggcacggaaaatgtatgtggcggggatcaaaccagatgagatcacatacaatctaattatcaagggtttcttcatgatgggtgagcatgagatggccaagacggtctttggcgcgatgcacgggaggggatgcaagccaaacagtaaggtttaccagacaatggtccattacctctgtgagagaagggactttgatttggcattcaggttgtgcaaggatagcatggagaaaaattggtttccgagtgtcgatactattaaccaactgttgaaaggcctcatggctatctcaaaggataggaatgggaaagagataatgaagttggttactgggagaaaaccttcgtattcagatggtgaaatgagggtcttcaaa

SEQ ID NO: 4902 - DNA, 825 bp, Zea mays
  misc_feature (771)..(782): n is a, c, g, or t
  misc_feature (803)..(809): n is a, c, g, or t
aggtgccttccgtgaactgaggattttaagcaatgagagatgaagagattaaccataattgaaatgagataagactaagatcctgacatgaaaaaagaacaagaggtatgatgattgacgttatcatatgggagtgaaaacgagtacattcaaatcctagctcattttccataacaaacaaaaactgacaaatcccaccctttcttcccttacaagcatctcatgataaaggaaaagtggattttgtaataaacccttcacaacttacagaacaagtgtactttcaatgatatgagtgtaaaacaatcctaaatctgaaagcgctcccaaggaattgcacaacatccaacgcaatttggtgtcttgatttgcagatctgttcaccgctatctcattggtttgccaacttcgcctcaaatgaaccctcatggcatgtttcatcacaagcttaaaaagaaacagggcttacttgctccacttcatcaatgaactatggttcatctcttcagactacaggctaatataatgtaaacgaaggcaacctagaaaaataattacctgtaagtctttgttcagtggctcggtgtacatgcctcctgatgcaactgtgatgacacgagcatttggtgccgctttctccaatgacggcataactagctctgttaaagtgtatgttgcagctacattgacagcaaaattgagctccaacctgttcccaaaaaaaagaaaagaaaagagcatggatatgattttagtgataaaactattcannnnnnnnnnnngtaattggctgtttgcaaacnnnnnnnatcacttacccttctg

SEQ ID NO: 4903 - DNA, 462 bp, Zea mays
  misc_feature (385)..(396): n is a, c, g, or t
  misc_feature (404)..(458): n is a, c, g, or t
aagctgtacaaaccagcgaagaccaggatttggaaaattttgttatcagtgacaaatcacagctcttacaacttagagaaaaatatagcatccagtgtctacagattttgggagagtatgttgaagctttgggtcctgttctccatgaaaaaggtgttgatgtttgcctcacattattgcaaatgagcatgaaagaccaggagggatgtgaccactttgctcaactccctgatgttcttaaattaatttgtgcattggctgcccatcgaaaatttgctgcactctttgttgatcgtggtggtatacagaagatcctctctattcctagaattacccagacatatatgggtctttctgcctgcttattcactttcgggtctcttcnnnnnnnnnnnntgtgcttnnnnnnnnnnnnnnnnnnnnnnnnnnnnnnnnnnnnnnnnnnnnnnnnnnnnnnnctct

SEQ ID NO: 4904 - DNA, 731 bp, Zea mays
aggtggcctgatacacttaggagctttaaggttgatggaaccacttatgatccgactgatgggaagatacacgattggccaagcttgagcatggatgaaaatctccagatgatcggaaagatagctgcggtttgcaatgatgcaagcattgcccactctgagcatcagtacgttgctactgggatgcccacagaagctgctctgaaggtacgatttgttcatgtgataaaaattcctttcatctgggatgctgttatagttaagttgttttttctactgatgtagcttggaagcaggtaatgtatacctgcaaaaagttaataaaaaatatataaaaaagaaaagatgataaaagaactggtagttactttcagtgacctctacaattaaaaagattgagcacaactctttcctcaagatacctgaaattgatgaatttacattctcgtgtgcctgttctacttgtggtaggttttggttgagaaaatggggcttcctggtggttatactccatctcttgattcatctgatttgctaagtatgtattcctttccaccttgtaaaatgttttccgtacaaatcgccaaaggttttgtaataattttatttatttttagggtgttgtcagtggtggaataatgctgccaagagagtagcaactctggaatttgatcgcaccagaaagtcaatgggagttattgtgaaagcaaactctgggaagaacttgctgc

SEQ ID NO: 4905 - DNA, 654 bp, Zea mays
  misc_feature (353)..(401): n is a, c, g, or t
  misc_feature (405)..(408): n is a, c, g, or t
  misc_feature (413)..(438): n is a, c, g, or t
  misc_feature (445)..(445): n is a, c, g, or t
  misc_feature (453)..(457): n is a, c, g, or t
  misc_feature (459)..(461): n is a, c, g, or t
  misc_feature (469)..(473): n is a, c, g, or t
  misc_feature (480)..(484): n is a, c, g, or t
  misc_feature (489)..(495): n is a, c, g, or t
  misc_feature (504)..(508): n is a, c, g, or t
  misc_feature (513)..(518): n is a, c, g, or t
  misc_feature (533)..(535): n is a, c, g, or t
  misc_feature (548)..(554): n is a, c, g, or t
  misc_feature (558)..(562): n is a, c, g, or t
  misc_feature (565)..(585): n is a, c, g, or t
  misc_feature (591)..(631): n is a, c, g, or t
gggtgaaagacgtcgcggatggggctgcgcaaaaacagcaaacacccggcgagcgtcgacggcgtgctgttcactgcgcagcacaaagcagcgacgaagccaggggagtgacggggctgcagtttttggaccggcattgctgcgcagagacttggacgccacggctgcagcccgagcaggggctccttgctgccgcaccagggaaaagaaggaaggggcgagcaacagcaggggaggaaagccggctgggaggaagatgaacagggaggcgctggaaaaaaaaattctgggcgccatccatagaaggggagctcggcgtgtgctgcgggagatggtcggctagagcagagggnnnnnnnnnnnnnnnnnnnnnnnnnnnnnnnnnnnnnnnnnnnnnnnnncgtnnnntttgnnnnnnnnnnnnnnnnnnnnnnnnnntcatttnagtttggnnnnntnnngacaatgnnnnnaccacgnnnnntcccnnnnnnnttccctgannnnngccannnnnnaagtctggacttggnnnaaggtttttgcannnnnnntgcnnnnnatnnnnnnnnnnnnnnnnnnnnnggatannnnnnnnnnnnnnnnnnnnnnnnnnnnnnnnnnnnnnnnntgaattaagcttacctgttgagt

SEQ ID NO: 4906 - DNA, 771 bp, Zea mays
  misc_feature (692)..(700): n is a, c, g, or t
  misc_feature (704)..(708): n is a, c, g, or t
gctgcttctcgtctgtttgcctctagaaatggattgctcccattgccgttgcggcgttgttcattgagatattcagctttcattgattcaacatattgatgaagattttccacctgaaaaatagcaaagataaggaaaccccttagtatgaaggcgatactaagcttattagcttagtagtaaatgataacaaataatggcttctcattttgttcacagcaacgttgcaacttctaaatgttaaatcagttaagggttttatatttgactcatcataagaaagcaataattgttagacatggcacatcatcaaagtatatttcatagcaaaaattatcctgaatttatttatttatataacctcttttttgagcaagcttaccttagaagcaacatagatgaagtaatcatgcacatttgacataacttttggaagagaatctagagaatctgatgatattttatttgtctcaatttgaaccagctgctctagctccccaatccacttgcaacactccgcaagatagcactcaaacctattgacagtgtgctgcataaaaatggaagggcgctttgggactccactgtagaaatctaacactggctgattgggtggagcaccagcagaaggatttgaagaaccaccatttgcaactccagcacctgtacgggtgaatcttggcctcaacatnnnnnnnnncctnnnnnagatagcactcaaacttgttgacagtgcgctgcataaaaatggaaggacgctttgggactcca

SEQ ID NO: 4907 - DNA, 995 bp, Zea mays
  misc_feature (961)..(968): n is a, c, g, or t
ccttttattaatcagggatcttcgaaatacaggttgctggtggtgacggtacagcaagttggctgcttggagtagttagtgacctgaaactatcacatccacctcctgttgctaccgtacctcttgggactggaaacaacctccctttttcatttggatgggtaagttaacaccttttgcttattttgagcacaccgaattcttaattatgattaatattctacctctatgtgttttatatgtctagaaaattttatgtttttggtgcaaatggagaatgtagggtagagtaaaaaaaatgattgttagacaaacatgataaaactataaaagtttgccacgagaaacacactatatttattagtgcatgctaacaaaaatgttatgactgagcatcagtctcagttaaaaaaacataattttttgttttaatatagaaaactagaagacttgttattaaatttgtataaatgtataatgttgtttatatgtaatttttccagttaaaattgcaatgttctttagcagttaggggcttgtaccaagttttacaattaaaaaaaacaatattctattttaatctgactgcagggaaagaagaatcccgctactgaccaggcagcagtgaaatcattcctggatcaagtaaaaggagcaagagaaatgaatatcgataggtactgtcttgcttacaaaggataaaagataatgttttgtcatgcactgcatgagctcatccatccatctcatatgatgaagtgttttatgctcttttccaattattgttttacttaacaacattagaacatatccttatgttcagggtacgaaagaaaacactcaattcagcttctagttgtatttttctgtttcagctggcatatcatcatgaggatgcgaattccacaggaaggcccatgtgatcctattgctcccttagatcttccacattcgttgcatnnnnnnnnccgcgtatcagcttgtgactctctcaa

SEQ ID NO: 4908 - DNA, 601 bp, Zea mays
gtcgctgctagtgcaacaagcgccagcttaccaagtgcctcttcccagataacatcaatgtaacccaggcttgagaagtagagcatcatcctgcaatggaaatgtttcagtacataagtagggaaagaaaaaaaaactctcaacgcaaatgagacaataacctacatcgcggacagcaggaaaccagaaatgaacatcgagatgctcccggcccagctcttcttccgattgaatggcagcttcgctgagccatacctcctcccaacaatgtcagcgaaacctgcaagttatatggcacaaacaatcaaatgcaacggcgttctataaaacgacatcgtgctattagatactggggacgggagtaccatcgccaccgctcatcatcgacaaggagacgatcccgatgggggactcacgccagaagactaaaacgctgaacagcagcaccaggacataatagagtggacctctcagcaattccctgtaaagaagcaaagtcgttatcgtcagagcagcaagctaaacgatcatacggatcttcagttcatcggatttactctggttttccttcacgtgtcactgattttaccagagcttcatc

SEQ ID NO: 4909 - DNA, 695 bp, Zea mays
agtagttgctgctgcctgcttgtttgtagctagattcacaatccacccaaagactcgtccttgggtaaagacaacatggcttttattgccaactgcaccctcccttcccgaaaagtaccattctagtaaatatgagtctagataaacgattaaccagattcttagctagaatgggacattattttgggatagagggtgtatctaaggtgtagggttttctgatatcagtgtgtatagttctcttttctgactttattgtttacaattttgcagaacttgacacttgaacaaaacacggggtataaagtctttgatctgcagaaatccatttatgtcatacatgaactgcagttgacaataaggtgcccagatcaggaagccaccaggaagaagtacaaggaccccaaggtacatccaccgttttgttgctctaacgtacattttgtgttttgttaaaatctgtttgcctgatcatttcagtttgggtgcgtgtcgacaatggtttcaccacgagaaatccctacatctttccctgaagattgccataagtgaagtctggacttggagaaaggtttttgcagtaatgctgctggcgatgtagaaaatagcttgattgtaggatagttggtataatacgtgctagttcacattagaatagtaagactgaattaagcttacctgttgagtctgagatc

SEQ ID NO: 4910 - DNA, 303 bp, Zea mays
tcgactgggagctgcctgccggcgcgcggcttgagctggacgagaagttcgcgatcgtcatgaagaaggccacgccgctggtggccgtgccgacgccgcggctgtccaagcctgagctctactactccgcctagtccaccactggcaccacatccatccactgggctgggccattcggcagaggaggaaatgtaacatatttggcccacctgccctccctcgtgaatacgttacatactgaacagtgttgttttaatcgaaagctccatagattgttacctcctacataggacaaatctgcca

SEQ ID NO: 4911 - DNA, 348 bp, Zea mays
acgcagaagcgggcgcagaggcagacgcatgcatgatgcatcgagcccccccagctcgcagtcgcaccggaggaatgctaactggagagccacgcctgccgcggaggaccgggactaactacgagctgccgcggccgttcctggtgcaggtgggacccacctcgcttcctttcctccttccagattatttaaagccatttccgttgcgtccaccatgtccagggtagagagagagagggatggtgtgagggagggaagggagcaaaggcaaagcagccaacgaccagagagacacggaggctgagagagagagagagagagagatttgggaatcgagaaagcagcgag

SEQ ID NO: 4912 - DNA, 673 bp, Zea mays
  misc_feature (404)..(404): n is a, c, g, or t
  misc_feature (612)..(641): n is a, c, g, or t
  misc_feature (646)..(669): n is a, c, g, or t
tatgcaatattgtacacacttctgaccatagagcagtactcactgattgagtgggttcacgagaaaatgatccttgaggggtactcacctgatgtcttgacatacaatgtggtgttgcgtgcaaagtatatgcttgggaagttggatcaattccatcaattacttgatgagatgggaaaaaatgggcttacgccggacctccatacttacaacctgttgcttcatgtacttggtaagggagacaaacccctcgcagctctcaatttgctgaactatatgagtgatgtcggatgtaggccaaatgtgctccatttcacaaatttgatagatggtcttggccgtgctggcaacctagaagcctgcaggtatttctttgatgagatgatgaagaaagggtgtgacangcctctcaacattgttaattatgtaaatgttttggtttatacatgcttgcagaaaggtccgtcacaagaatgtagtgcagtttatcggtgcatgcacaagacaaccaacactgtatattgtaacaggtacactacaatgaaattcatctctgcaatagaaatgtcaataaatttctgtggcgtctaatccccgtaccttttttttttnnnnnnnnnnnnnnnnnnnnnnnnnnnnnnggggnnnnnnnnnnnnnnnnnnnnnnnnaaaa

SEQ ID NO: 4913 - DNA, 711 bp, Zea mays
  misc_feature (604)..(606): n is a, c, g, or t
  misc_feature (684)..(698): n is a, c, g, or t
tttgggaacttgaccttaagctgctcaagtttggaagcaaagttgcttccggatcaaatggtgacctgtaagtttaaacttttcttagtcaataacatggaactgggaactttctgagcttcgtctgatctctgatgcttgcttaggtaccgtggaacatactgcaatcaggatgtggccatcaaagtagtgaggcctgagcgcatcagtgcagatatgtaccgagattttgcacaagaagtgtacatcatgaggttcgtttgaattttttactgacatgagctttccgaagacagttgcatctcccagttatgattaatttcactaatattggagacgccaaatcctaccatcctagtgtaggttctaacagttcataaatgcctctcaacattgttaattatgtaaatgttttggtttatacatgcttgcagaaaggtccgtcacaagaatgtagtgcagtttatcggtgcatgcacaagacaaccaacactgtatattgtaacaggtacactacaatgaaattcatctctgcaatagaaatgtcaataaatttctgtggcgtctaatccccgtacctttttttttgcatgtccttgtcttnnntttcatgtcaggagggagtgtctatgattacctccataaaaataataatgctttcaagcttcctgaaatactgaaagnnnnnnnnnnnnnnnctaaaggaatgaa

SEQ ID NO: 4914 - DNA, 378 bp, Zea mays
tgctgttcaccgccgagttccgcctgccctgcgcgctttcctcagagaggaagcgtgcgcgtgtcgaccagctcggcctcttctacgccgctaacaccatcatcggcaatgggggccaccacggcacgtcctcggcagcggcggcctgtacgcggtgtgtgctggtgatgcaagtggcggcgtgggcgtgggcgtgggcggcctgtacgaggtcgtgtacaacaacgtctttagtctatgcgtcaaggcgattgggtggaggcccgagtggaggttcaagtggaagcccctcgacgacatcgacggggagaagaggagcgcccacttccctatggtcctggtccagatgcccatgtataacgagctggaggtgcataa

SEQ ID NO: 4915 - DNA, 374 bp, Zea mays
caaaagcacaagtgcaaccaattttttttggttagaatcttgcagtttgaaaggctggtgaagtaattcgcaatgctaagatgaattttctttttatgtgcagaaaccctgccgctggtttccctgctttggctggtgagcatcgtctgcctgttcctgatgcccgttctgcccaaccgaagtccagctgctccaagcagcggcggaagagacctcgtgatggcagccggaaagacaagcagtgagaccccagagatactggaactcatcctccatggaaggcgttgcaagagcacgagggcgaagattaagctatgtattttaccatttcatgcaggagctgcttgctagtagttgctaggctttgagcctct

SEQ ID NO: 4916 - DNA, 368 bp, Zea mays
agcttccgaacacttcgtgagtttgtagctaagaggttcccatcatccaaggcagtgttgattaaatataaggatgctgatggtgatctagttaccatcacatcaacagaagagctccggttagctgaattattcattgataaagttggccacgaggttgtagaaaatgggagggaggatgacaataagctcccggtgttgaggctgcaccttgttgaagttagcccagaacaggaaccaactttgccattggaagaagagaagttggaggaggatgaggaattgttgatcaatggtgaagatagcactttacatgctttagcagtggtaaccgacgcagaggtggtgaagcaagatgttgagaacag

SEQ ID NO: 4917 - DNA, 390 bp, Zea mays
cgcaccgccctcggggtccccgcccaagggccacctcgccgtgtgcgtgggccccgcggcgcagaggttcgtgatcccgacggagtacctgaagcaccgcgccttcgcggcgctgctgcgggaggccgaggaggagttcgggttccagcaggagggcgtgctccgcatcccctgcgaggtccccgtcttcgagtccaccctcagggccgtcgagaagaacaagaaggacgccgccgcctcctgttactgcagcgccgagtacgccgccgacgaggtcgggcgcggcacgcccaacaacccgctctgcagataggtggagctcgaggacagaacaaaaatgtcttcttcctcttcccttttttgtttctttcttcttgctctatgtaacgt

SEQ ID NO: 4918 - DNA, 399 bp, Zea mays
ctgctcactgaagcccacgcagaacccgcttccgagcctcccggtcgacctcctcccgctcctggtcctgggcaacctctcccagcctctcgtcggcctcctgctcccactgttcgacgccgccggcgagccgtgcaagtgtagcaagggcccgtacggccgccccgaggacctgaactacccatccatcgccgtgccgtgcctgtccggcagcgccacggtgaagcgccgcctcaagaacgtcggcgcgcccggcaagtacagggttaaagtcacggagcccgcggggatcaaggtcaccgtagtgccgagcgaattgtacttcggggtcggagaggagaaggagttcaccgtgaagatggacgtggacgtcaacgccccggcggctaatgatgacta

SEQ ID NO: 4919 - DNA, 918 bp, Zea mays
  misc_feature (875)..(884): n is a, c, g, or t
tcgctggcaggtcagtagcactgactggagtatgattttgatagcaggaaagtacataaaacatgataatggattctcgccattgtgttcgccacataatgatgatatagtgcctgtttggacgctggcattgagcgccacaccccgcctaagatacggcggccgattcggccgccataactgcggcgcacaaagtgtggcgcggcgtgctaccagcggcggtgatccaaacacgcccatagactagtgttttagtagtcctttttctttttttcttgtcaacggttcttttgaattattgtttttgttgttgttgttataaagaaatccaatggtaatgccgcagagaagaagaaaaaaacaatagccacagttaacgggttgtctgtgtgtttctgctttgtactaaattttagacatttgttcatggcaggtgagcatatcggattttggtcacgatgacctatacgacatattcggggacatctcatcgaaagggctcccacaagagtcgctgaagaaactaccacactatgtggtcactgaccagacgcgcgcggactcgttcggccagatcctgtcctgccctatctgtctacaggtacaatactgccacggagtagttgtcaatgaaaattacagcctcaatggggacaactgcaattagcgattcccataccgggatttgttcgctactaaatgcgacgtttcttctcctcatcaactgccgacctgacctgacctaacctaacctaacagcgtcctcttcgtccgtcttgcaggacatcgtagccggcgacacagcgaggaggctgcccagttgctcccacactttccaccagccttgcgtggatagatggctcgtggatcgcggnnnnnnnnnngtctgcaggcaggacgtgtgagatagccagatag

SEQ ID NO: 4920 - DNA, 383 bp, Zea mays
ccagacgacggcggccacgggcgcaggcatcaacggagcaactctgccggagaacatgaccgtcagggcggtggtgacgacccatatggccgccttcacctgcaacctccggggcgatcccgggggcgttttctcgaacgcacggagcaggtggaagagaagcacgacgcagaagaagctgacggccacaaacagtatggactgggggtcgtgtctcgagccgtagatggctattgcgctgttgagcccgagaacgaacagcgcgacggccgaggtgcaggctgacgagccgccatcggaggcggctccggtgggagtagtggggttgtcgtcgccgcaaggagcaggatttagggagagtctgagctctctcttcacgaaag

SEQ ID NO: 4921 - DNA, 829 bp, Zea mays
  misc_feature (622)..(622): n is a, c, g, or t
tattaatattatttctgtcctcgaccgaaacaggtacttttgaacatcaattggttccaaatttatatgtagcaaatgtaagtatgtaacaccatcatgcatgcatatttgttcaatattaaaagaatttcatgctggtgcaagaaataccttgaattgagcaagttcttcaggcaaagcaagagaatcctttgtcgttaaaagagggaacatctggcgaagaggagccatatatttttcagagttgtatattttacccgaagcaacatatagggaggttgtattatcgaatcccatgccccttagcatcatgccaacctgcatacatttattgaggacatatcatctccagtaaacccctttttacatattgaaacatttttcagaaggcaacttccccaatgacagcctgaaacttaaccaactaacctgacttgctagctgaaaacagaaaaaagggggaaaatgcaaaaaccaagtctataacaatttgaaggaataactttgaaatcctgactgcatgattcagtgcatacaaagcctaagaggcccaacataaatgtatgtccaacataaaaaatgctcgactcccatgaactggtctactttggcggtacagccnaagaggcctagactcaaaatgtgctatcatagacaaagacaaaagggaaataggtcctaacctctaaaggagtaagagggcacttcccgtcccttctgtttgcctcagggtttatcactcgaccatgccgacgaaacttacctctccagctcctttcacgagcattgtccatttcagttttttccctccagccaccatcatatgtac

SEQ ID NO: 4922 - DNA, 363 bp, Zea mays
tagtgtaacaggtatccaagcaataaagcttttgcattcttttatttttttcttaaaagcaagagccagtacatccagatccatgaatactgctttcaatagaagcgttgttttcagtttctttgatctaattttctgtataaattggtaattgctgaccgagtgacatctttctagtatttgctatttcttaccctgcacttaaaatttaatgtttcttccttaactttcccagctgtaaataattttaccttaagcatgatgggcagcacaggcttcatggctcagttgttattacatgacatttggttatggtttagtccaatattagattcgtacgcttgcgtactataaacaggacat

SEQ ID NO: 4923 - DNA, 321 bp, Zea mays
  misc_feature (269)..(269): n is a, c, g, or t
tctgttagatcgagctcttaaagttcaaagaaaatatgttcaacaatttaatgttgctgtggagcagatctgcaaggcttataatgaattgccaaaaacatctgaagccgcaaatgtagcattgcctgatcagagtgaaaagactacagagcacctggtgaggtcacctgatattggtgggactccaggactgggacaaatggaagatgatccccctactgattgctcaagtacttcagggcaagggtcagggaccgaggaggatgtcnaagatggtggtcatgaaataggtgataattctttggcagttcctcaaaagaa

SEQ ID NO: 4924 - DNA, 714 bp, Zea mays
ggatactcgtaatgttcattgtgtaaatgaggtacgtcctattgtctgcattattcactgtttcttttttattttgttcttcaatttttgttggatatttggatgcatatcaactctttcatgaactgtactatacagttaatggtgaataccacatttcactatcaacagtcatcccaaatttctgttttttccttgcacattttttggggtaaaaatcaattctttgcagccttgttgttatcaattattttcgatctttgtgaaggatctcgcatgcccttccatttttaccaacagttacaacatgttttgctttacaggtaactgaaggggaaaggttgaccctgactctttggttcactagagaccgtgcttatgatgaggatccaaaacttctaaactttctgtctcagacatcattgagctgtgaaccaactgagcaaaattcttatattcctgtaccagcttctgataacatgtatcacttttcttgtgatcagtctggttttgacatacgatgtgctagagtgcgtattcttgggtttagttttcactcaagtagtggtgagtgcaatatatctgcgtcaccagctgaagatgaccaaatagagttgcttggaaagcaactgcggctcgggaggggagatgatgtctttgagaaaatattttctaacagcttacatgctcttcaggtatgttcattctttgagt

SEQ ID NO: 4925 - DNA, 393 bp, Zea mays
ctccattgctctcctccaccccattctggttcccattgctagggttcgtcgtgctagggtttaggtcgctccttctccaccacctggccgcccaccctccacctctcgtgcttcccggacgccgcggccgccgagacgatggccaggagcaggagccaccgagcaatcgtcgccaccgccataaaccaagctaactaaggcagctagaatctctgctttgagttcttcccctgtccccgcacgggctgcgatctctgctttttttgggttccccaatcccattccgtgtcctcatgctgccattttggggttcaaggttcgtcgtcaggttcatgtgctttaatgtcaatattggtatgggcgatactgaagttaatgccagcggttattgtc

SEQ ID NO: 4926 - DNA, 407 bp, Zea mays
ctcgtcgccgcgctcaagggcaacccgggcctcctcaccgccgacctccggacggtcaagtccaccgtcgcgctgctccaagaggaaggcaccctcaccgatggcgacgtcggctggttcgccatctcatactgctccaagctgcttgtcgcgagcccggacgaggtcgactccgtcctagcccgcgccgacgagttcggcgtgccgcgcaagacgcgggcgttcaaggacgcgatcatcgcggcgttcagcgtcactccggagcggctcgcatggaaggtcgcgttcttcagggacgagctcgggtggacggaggcgcaggtgaagacggcagctgcgaagatgccgacgctgatgacggtctccgcggagcggatccggaggaactgggagttcctgaccacaga

SEQ ID NO: 4927 - DNA, 413 bp, Zea mays
gtcgcagaggatattgacagaacttcagcctggagaagcagaattatcagatgattctgtagtgacaccaacaacaaaggcaactggtgatcttgttgtgagacaagtcagttttcttcggagtttatctctcctcccagctgattacaagaattatctccgttcgaagcgtatgaaggccatgcaacctggtgatggtggagcaatattgaaatatttacagacaatgcaaatggataacccctcgttcttttacactatgcagatcgatgaggatgacaaactgacaaacttcttttgggccgaccaaaaatcgagagatgacttcaactatttcggtgatgtgctctgcttagacacaacatacaaaataaacggttatggtagaccgcttgcgttattccttggtgtga

SEQ ID NO: 4928 - DNA, 379 bp, Zea mays
cggcgccaaatgaggcgacgacgtctgtgcgctcaccctcggtgaggagtgcacagaccaacgacctccgggcaaagctcaacagcaggcgtgcgggagaggatgcccgggtctccctggagagggcacgggagcgccgacgaaacatcgagggtcgcaacctcgatcaggattttgctgcggtagcaccgcaaaccccagcaggtgcccagatccaggcgggtgtcccattggccgacgtgggttgcgccacgctcgcggatcatctccgcgcggcgacctggccacccaagttctggtcacacttgcatctccacgcggcgtgggcaggagcctggggaaactctccggaccttcatctcccgcttcaccagggtat

SEQ ID NO: 4929 - DNA, 346 bp, Zea mays
ctgtgacgcctgccgagtactcgacgtaaatcctgaaccagggtctcatcattgttcgtgtgaagttcaagccgattataattttggaaggagatttggtgctgaagtcgaagccagtagcccctttattcttcgtcgtcaacccacgccgcgtcgcgacgtgcccgtcgatcccgacgctctatctgccagttgtgtgccacttgtgttgagctctgaagcccctgtcgagctcttcctctggaagccgccttcgaacacaacccttgctaagtgttcgataggaagcctgaaccaatactcatcgttgatctacgattattaaatcgttccggtcatagtaagc

SEQ ID NO: 4930 - DNA, 356 bp, Zea mays
tgatgctatttgcttccaactaataaggataatgaggaacatttattcaagatgattaacttaagcgaccaatctccatttatgatatttactcaatcaacaaccatagaacatgataattactaaaacaaagcatcacttcaccaattaagaatcagctaaacttacttagccaaacaatagtaacttcaagccaacaatttaatacttgcagaatttttagacagcagcacagcggttaattgttttattcataactcacaaaatatgcatccaaaaatagtaaactaggactttctggaaagcttagaaagtcctctataactcttatattatcatcacaacatgattcgaca

SEQ ID NO: 4931 - DNA, 728 bp, Zea mays
  misc_feature (510)..(512): n is a, c, g, or t
  misc_feature (642)..(648): n is a, c, g, or t
  misc_feature (668)..(689): n is a, c, g, or t
  misc_feature (711)..(717): n is a, c, g, or t
  misc_feature (720)..(725): n is a, c, g, or t
tagagctctagcgaagactggagtaccaaccagccggcagcacgttgtcgccggtctccatcacctcctgaggatgcagcagccatccggactggaaggaaaccagaatgcgcctccgtcatgaagcccaaatacctgagcaaggcctgtattgacaaagaaaaattttcagaatgtgccttttgtttttgcaagcatgaacaatgggcaaacattgatgcgttaattctttagctggtaagtacagattgaagttggtgcaaaagcaaaaggcaggtggtattttttttggttagtacagcgtgaagcccaaatatattgatgatatccgccttgaaataaccttggaatttgtctcacgtgacgtttggatcccttcattttaaaataattggaattcacttaataaagtaacttatttagtttggaatttgatattctaccactttttaaagtttagatataagactatctcaaatttatggggtgtaagatgagaaatgattttannnattagtagaatttgtttctactctgcaacttacataacactctttgtctcactcctttatttaaaaatgtaacacataaatatctccaacatcttattaataatagtatacaaatatattttgcataaannnnnnntaacttaattgatatatgtnnnnnnnnnnnnnnnnnnnnnnaattcaattccattgatctaannnnnnncgnnnnnngat

SEQ ID NO: 4932 - DNA, 452 bp, Zea mays
  misc_feature (446)..(447): n is a, c, g, or t
tcatacaagtttagttgatgagtttcgtaaaccaaggcaagacaatgtgcaaggagacgggacaagcgatgatgaagatgaaactatatggcaatatgttagtgatgatgaaagtccaacaattcttgtcgaggatgatgatgatgatagcgatgccgagtaaagactagagtaagttgtctctagttgaatatatttttttcacctttcacatgctatatttatcctatacataccttctaaaattatgctttttgattgtctttactgtagaagttgatggtggaagcgttgctgacttatatggatcttggtcatgaaaatggtgacccacatggatattgggtcactatgataggatggtggcaattagtgtgtgctaggatattaaattttattctagattttgggatgtcctaggtcttttagctcggacaaagtctatnncttgt

SEQ ID NO: 4933 - DNA, 743 bp, Zea mays
ctcctcgaattgcaccaagtgatcgaaatcggagattttgatcgagtgcatttctcttcggtactgtatcttaagtagcaatagaaatcaatcttttcatggccattgtgtctggagttgggatgcctacatcctccagactccagttggaatctcttttttacatcatcaagtagcaatagaaatcaatcttttcatggccaggtcccttcaccaagaatttggccggtttctcaactatctccgattcattccatggcaaattaagcctctcagagatagtctgctgcatctccactgtgttcagggtctctgaattggatacttcaataaagataacaacctggaatacccaatttaaggaaaggtataaaaaaaaagagccacatccactccatgctgtaaaaatcaaatatgcatagttcatgtaaatatccatagtttatatctgaacctccaacatcttcagcttgaactagtactcgtgaacaacatattagctgtgcctgtgctatacatgcgtgccagaaatgcttggctacacaagaacccatttctgaaagtctgaaactcaaaacatttgcactttaatttaattcgttctgcatatcattctgaacacactacgaaagtaagcaccattaaattcatccttgaagcaatcctatatatgcaattcaaaacaagaacgcaaagaagcagattcacgtatattctgaatttctgatgagtaaattgcagct

SEQ ID NO: 4934 - DNA, 391 bp, Zea mays
cttgtttcttgccactggttttgatggggatggtgctctctttcctctggcatttggcgtggttgatgaggaaactgacgagaactgggtatggttcttgtctgagctgcatgagttgctggagaagaacacagagaacatgccaaggctgaccatcttgtccgatagacggaagggcattactgatggagttgaattcaacttcccaactgcattccacgggtactgcatgcgccatgttagtgaagccttcaaaaaggagttcaacaatcctgtgcttgccaaccttctctgggaagctgctcatgcgctgactgtgattgagtttgaaactaaactgctggagatagaggacgcttcaccagaagctgttgtttggataaggcaccta

SEQ ID NO: 4935 - DNA, 611 bp, Zea mays
  misc_feature (351)..(370): n is a, c, g, or t
  misc_feature (379)..(422): n is a, c, g, or t
  misc_feature (425)..(431): n is a, c, g, or t
  misc_feature (456)..(459): n is a, c, g, or t
  misc_feature (463)..(468): n is a, c, g, or t
  misc_feature (480)..(489): n is a, c, g, or t
  misc_feature (505)..(505): n is a, c, g, or t
  misc_feature (553)..(553): n is a, c, g, or t
  misc_feature (569)..(572): n is a, c, g, or t
  misc_feature (600)..(607): n is a, c, g, or t
aagaagaaattaacatgcaagccattacattacatcaaggactaattaactgccccgggagagcattctcttgggtgcacggtaattacacgggctatctcgagataattaccacaaacaccccaaggttaactatctccacacgtcttactccctgccctcgcaatcctgagtctattacaactctaccccctaaccttaaacaaaagaaccagattaattaattaccccttgactccggccgtcgagctcggctcggtgccgctgccggcatcgtggatcggaccgacatggccgtaccgtacgtgaccgtgagcaggcgatcagcacgcataatactcgacgagctcnnnnnnnnnnnnnnnnnnnntcggtccgnnnnnnnnnnnnnnnnnnnnnnnnnnnnnnnnnnnnnnnnnnnnagnnnnnnntaattaatctggttcttttgtttannnntagnnnnnngagttgtaatannnnnnnnnntgcgagggcagggagnaagacgtgtggagatagttaaccttggggtgtttgtggtaattatctngagatagcccgtgtannnnccgtgcacccaagagaatgctctcccgnnnnnnnnaatt

SEQ ID NO: 4936 - DNA, 351 bp, Zea mays
  misc_feature (343)..(343): n is a, c, g, or t
ttgattatcgagtagatacagatcctccaagttggtgcagtttccaattgaactgggcaaaactccagacaacatattttcctgtaaccacaatgacttaaggcttgtcatttcaccaaccgataagggcaccgaaccactgagctgattgtcatgtaggtacacttgctccagaaactggttcttgaacaactcctctggtattgttccattgaaggagttgcggtacagtgacagtgatgaaaatttcttgaggttgcccaatgatgctggtatattgccagaaaaaaggttttgggacaaatccagttcttcaagcatactgcagtctcccaattctagngggatcaa

SEQ ID NO: 4937 - DNA, 1112 bp, Zea mays
  misc_feature (740)..(742): n is a, c, g, or t
  misc_feature (865)..(867): n is a, c, g, or t
  misc_feature (882)..(886): n is a, c, g, or t
  misc_feature (1010)..(1010): n is a, c, g, or t
  misc_feature (1012)..(1022): n is a, c, g, or t
  misc_feature (1051)..(1063): n is a, c, g, or t
  misc_feature (1094)..(1105): n is a, c, g, or t
ccaggaccgacaaatgtaaatattgacagagacaaatgaaatccagtggaatgaatgacgtgcatcagtggcatattaactccaaaaaggtgagaaatgtgtcccacaaggcaaaccgcacataatgcccatgatacagcaagttctctacctagaagaacaatcagggcatcatgtcagcaattaagttaacactctgtataataaaaaatgggagtttgcaaacataccaatgggccaaaccccagttttctgtttttgcactgctggatgtctcaatggcagctggcaccagggcccgcttgtcattgagacatgccatggtaaaatagcaaacaggggtaacgactagtggacagtggcatgtttgcaaattttccttttaaaaacatcatggactgggagaagcttgtaagctgatggttacttgtgtcaacaaaaaaatttaccactttgtttcagctgttcaagtttgtcttgcatctttctttcgaaaactgtttgtgaaccaacctttgaagaatctgcagatcaaatagacatttgcatgagtatgaagactgaacatacaagcagcagcaaaattttggagggggtttcatatttgacagaaggggaaagtggatattatatatttgcaacatgttgtctgtgctcaagtgtaccatgtgagcaaagaagactttgcattcatttatctcaactctcaagacaagattgactgataagcaacatgaatnnnaaagcactgcttcatctttccatttaaaatatccagaagaacatccagttggttaagagatttaactatttgagttatggtcgtcgacattttctattgaaaagaaaaggtattattttagtnnnttattttttttgaannnnnaatggagctctgcctttcaattaagataggaaaagagcgtaagtacaggttaaaaattacagtgcacccagggacacgagggagcagtgttaaaaaaacatccattattttagctctttattcnannnnnnnnnnnaacaatgtatccattattcaactgccccnnnnnnnnnnnnnaaatgtgcaagtttagccctttgacagtacnnnnnnnnnnnnttgcagc

SEQ ID NO: 4938 - DNA, 705 bp, Zea mays
atctgaaacttctactgatccgttacatgacgtagagagagggccctaggatacatttccttttttttgggttaccttttggctttatggagaagctttgagcaaggcagcttttctgcgtccatcagccacagctgatttcactgccatagttttcttcaagcagtagttttgttcctgtcaaatgaccaactggtagtggtaagcaggtacgatgtgctcggtagcgaggctggcgtttgtgcttgcactggccatagccgcctcatcaattacggttgcggagagcagagattttaatatctttggtaagctttcaatctactgatttttgctccttactctctttattcgttgttgaatgttgattcatagcagtgaattatcaggtctagtgatagtttcttttcgatggagatctcgtgatagtttcaattagtttatctaaattccttatctgtttgacaagttcgtatcttcatttagtccggtgacatgttaaagaaagcaattacgtctaagccatcagttctactcactgtagagggcgtagcttcagcttagctgctatttcctcacagtaactcaagtttttctgaagttttgcatttctggccaatcctttcttctgtcttcaattcagctcagggcagcttgcctgatgcaaccaagggatcgtcaggtctagctgcaaccagtggaaag

SEQ ID NO: 4939 - DNA, 2295 bp, Zea mays
  misc_feature (2065)..(2066): n is a, c, g, or t
  misc_feature (2080)..(2080): n is a, c, g, or t
  misc_feature (2083)..(2085): n is a, c, g, or t
  misc_feature (2088)..(2088): n is a, c, g, or t
  misc_feature (2090)..(2090): n is a, c, g, or t
  misc_feature (2092)..(2092): n is a, c, g, or t
  misc_feature (2099)..(2102): n is a, c, g, or t
  misc_feature (2105)..(2105): n is a, c, g, or t
  misc_feature (2107)..(2107): n is a, c, g, or t
  misc_feature (2112)..(2112): n is a, c, g, or t
  misc_feature (2114)..(2116): n is a, c, g, or t
  misc_feature (2124)..(2124): n is a, c, g, or t
  misc_feature (2126)..(2127): n is a, c, g, or t
  misc_feature (2129)..(2129): n is a, c, g, or t
  misc_feature (2132)..(2134): n is a, c, g, or t
  misc_feature (2139)..(2139): n is a, c, g, or t
  misc_feature (2146)..(2146): n is a, c, g, or t
  misc_feature (2148)..(2148): n is a, c, g, or t
  misc_feature (2152)..(2152): n is a, c, g, or t
  misc_feature (2154)..(2154): n is a, c, g, or t
  misc_feature (2159)..(2159): n is a, c, g, or t
  misc_feature (2161)..(2162): n is a, c, g, or t
  misc_feature (2164)..(2164): n is a, c, g, or t
  misc_feature (2173)..(2173): n is a, c, g, or t
  misc_feature (2175)..(2176): n is a, c, g, or t
  misc_feature (2180)..(2180): n is a, c, g, or t
  misc_feature (2186)..(2186): n is a, c, g, or t
  misc_feature (2190)..(2190): n is a, c, g, or t
  misc_feature (2194)..(2197): n is a, c, g, or t
  misc_feature (2205)..(2205): n is a, c, g, or t
  misc_feature (2208)..(2208): n is a, c, g, or t
  misc_feature (2210)..(2210): n is a, c, g, or t
  misc_feature (2212)..(2214): n is a, c, g, or t
  misc_feature (2221)..(2221): n is a, c, g, or t
  misc_feature (2223)..(2224): n is a, c, g, or t
  misc_feature (2231)..(2231): n is a, c, g, or t
  misc_feature (2236)..(2239): n is a, c, g, or t
  misc_feature (2246)..(2246): n is a, c, g, or t
  misc_feature (2248)..(2248): n is a, c, g, or t
  misc_feature (2250)..(2250): n is a, c, g, or t
  misc_feature (2253)..(2253): n is a, c, g, or t
  misc_feature (2257)..(2257): n is a, c, g, or t
  misc_feature (2259)..(2259): n is a, c, g, or t
  misc_feature (2262)..(2263): n is a, c, g, or t
  misc_feature (2269)..(2271): n is a, c, g, or t
  misc_feature (2275)..(2275): n is a, c, g, or t
  misc_feature (2278)..(2280): n is a, c, g, or t
  misc_feature (2282)..(2282): n is a, c, g, or t
  misc_feature (2286)..(2286): n is a, c, g, or t
  misc_feature (2291)..(2294): n is a, c, g, or t
ccactctctttcccaccgccttcttccactactcttcaccctcccctcctccccatcgcgaactcacaagagaaccaagtagacgagggagaaggagatggcgaagaagaaggagaaggcggtgaacgtgtcgggcaagccgcggcactcgaacgacgtcaaccgccccaatgacaagaagggcgcgggcggcggcgccggtggcgggagccggtccgcggctaccgtgcggcggctcaagatgtacaagacgcggcccaagagggaccgctccgggaaggtgctcaggaacgattttcagtctaaagagctccccaacacccgcatcgagcccgaccgccggtggttcggcaatactcgcgttgtgggccagccacagcttgaaatgttccgggaggaactccagagtcggctttccgacaacttcagtgtcatcctgaaagaacggaagctgccactatcgctcctgcaagatcatcaaaagcaagcgaaggcacatctgcttgaagttgaaccttttgagcatgcttttgggccaaagggcaagaggaaacgtccgaaactaactgctcttgactacgaatctttgctgaagagagctgatgattcccaagatgtgtttgagcaaaagtatgcttcatcaaagttgccaagggaggaagaagaagatggcttacgtgatctagtgaggcatacaatgtttgagaagggacagagcaaaagaatctggggtgaactatacaaagttattgactcttcggacgttgttgtgcaggtgttggacgccagggatccaatgggcactcgatgctaccatctagagagacatctaaaagagaactgcaagcacaaacacttggttttcttgctaaataagtgtgatctaatccctgcttgggctacaaaaggatggttaaggaccctttcgaaggactatcccaccctagcattccatgcaagcatcaacaagtcatttggcaaaggatctcttctgtcagtattgaggcaatttgctcgtttgaagaatgacaaacaagctatttctgtcgggtttgttgggtaccccaatgttgggaagtcatcagttattaacacactacggtcgaagagtgtctgcaaggttgctccaatacctggagagacaaaagtgtggcagtacatcactctcactaaaaagatatttttgattgattgtcccggtgttgtatatcaaaacaatgattcagaaactgatatagttctgaagggtgtggtccgggtgacaaatttggcggatgctgctgagcacattggtgaagttcttaggcgtgttaaaaaggagcatctccaaagagcgtacaaaattcaagattggtctgatgataacgattttcttgtccagctgtgcaggaccactggaaaacttctcaagggcggggagcctgatctgacaacagcagccaagatggtacttcatgactggcagaggggtaaaatccccttctttgtaccccctccgcagcaaagcgacggcggtgcatctgaaagtgctgaacaacctattgggattaccaaagaggacggagtaagcagcgacaggactgccgcagccatgaaagccattgcaggaataatctcgtcacagcagaacatgaatgtgccctgccataaggaaaacaatgcagacaatgaagacactgaaaatgcagataacgaagacattgagagttcagataacgaagacaatgatgacatcgagcctgcagagcgatctgagtgatctttgggtacagatgtggattattagagttgatatgtcaaggctaatgaatttgtcagcccaggtgttgtgtagctacttgaccatatcactggcgtgccaggaaaaaaaggatcatgttgagttgcactttttgtaactatcgtacctgaatctttgtaatagggcaagaagagcagttttgctaggtacctggttgtatcgggatgcttatctgtgctgtctactacagatacagttacatctattttacttaaatcaagtggaagttatctctaaaaaaaaaaagcggcttcggcccctttnnctttcccagtttgnttnnntcntngnccttctnnnnccncnttgcngnnnccttctcntnncnatnnnccttnctttttncntttntntcctngnngnttttttttntnnttgngctgcncgtntttnnnntccactcnggngntnnnttttctngnnctggttnttccnnnnctttttntncngtntgtncntgnntttttnnnctcnccnnntnttcntctcnnnnc

SEQ ID NO: 4940 - DNA, 1710 bp, Zea mays
gattactcattgcttcctgcttctatgtatgtgcagatgggttgtacttgatagaggttgatcgtatcctgcgtcctagaggttattggattttgtctggacccctaatcaactggaagaaacactggaaggggtggcacaggactaaagaggacctagatgcagagcagaaagccattgaggcagttgccaggagcctctgctggaagaagatcaaggaggaggatgacattgctatcgtgttattatacggttccgttgcaacgcacgggcactgccccggggccggccggggttgctatctctacttttgacctaaaatccggcctccacggctccacccacgagccagtggaatcttaccgattcggcaaccgtgctaatcgatatccgtgcaattccacctcccgaaccgaatccctccaccgacccaaaccctagcgcgcacccttctccgtcgtcctttcctggcgcgcgggccggtgtcggagatgcgggcgctgctcgcggacggcgggatggcactggcggtgtcgccggaggccaacgagtcgtcgggtggcgctgcggtgtcgctagggccgttatcgtgggcgtcggagtgccacggggtactgtacaacctggccttgatgctgccatcgctggcctttgtggggttcctggcgtggcaggcgcggcggagcttccgtaggctcagctacggccgctctcacgtcgttgtcgtcgcgtactacgcgctcctctgggccgtcgccgtactcaacctcctctggtgcttcctgcaggcatggcaatgtatgcctgacagggcattctcttggaatatactgtcactgtttacaaaatcaggaatgttattcttggaagtgagtctcatagcctttctacttcaaggaaatgatgccagcggttttgaatctttggcacgaacctttgttatatctggagctgtagttgctgctgatgtattgctcaagactatatatgtttttggcttcggtgttcctttgttcattgatactgatcaaggaactagtgggaaatggggcctgtggattctccacaaacttgtgcttactggagtctatgggctgattgttttcatgcatcattcaagatggagagacaggctgcctgcaaaaccagcatactacaactatgtatgtgtgatgttgctactgaatggcatatcactgtttggatgtttccttattgcaagtggagctggatttggtttatggttatataatctcacaaccgtatgctatcattctctttaccttcccctcctatatgtgactttcttagcagacttcttccaggaggaagacatgctcctagagaacgtctactattctgaaatgaaggatgctgggttcttcgatgctgactgggattaatccgtggctactgtgctgtatgacccatcccatatgaagtacgctgtatttgtttttattttatctgtgtactctcaacgtagaacaggaaatgtatgtagctagccgtggtagtgaatggaaatatgtaatcttactgctgcatacttcagaaaatcagaattcaagtgatttcacggctgagattgccatctcaaaaaaaaaaaaaaaatttacgtcgatggtacaaaactacgaagtcggtcgtcaaaactgcgtttttgcaggctcgttttataaatgtaagcgtatcacccaggattctacc

SEQ ID NO: 4941 - DNA, 1780 bp, Zea mays
aagaactctacataaaaccccaccacaagggcgcggcccgcacacggttcctctctgaccactcctctcctctcctctcctctcctctcgccggcgcatcgcccgactgtcagtcagcctcagccatggccgcggaggaggagcagggcttccgcccgctggacgaggcgtccctgctcgcctacatcaaggccacgccggcgctcgcctcccgcctcggcggcggtggcagtctagactccatcgagatcaaggaggtcggcgacggcaacctcaacttcgtctacatcgtgcagtccgaggccggcgccatcgtcgtcaagcaggcgctcccgtacgtgcgctgcgtgggggactcgtggcccatgacgcgggagcgcgcctacttcgaggcctccacgctgcgggagcacggccgcctgtgcccggagcacacccccgaggtgtaccacttcgaccggaccttgtcgctgatggggatgcgctacatcgagcccccgcacatcatcctccggaagggcctcgtcgccggtgtcgagtacccgctgctcgccgaccacatgtccgattacatggccaagacgctcttcttcacctccctcctctataacaataccacggatcataagaacggagttgctaagtactctgcgaacgtggagatgtgtaggctcacggagcaagttgtgttctcggacccataccgtgtttccaaatttaatcggtggacctcgccttatctcgacaaagatgctgaggcagttcgcgaggatgatgagctcaagttggaagtagctgggctgaaatcgatgtttatcgagagagctcaagctctgattcatggagatctccacactggttctatcatggtgaccgaaggttcaactcaagtcattgatccagaatttgggttctatgggccaatgggttttgatattggagccttccttggaaacctgattttggcatactatgcacagaatgggcatgctgatcaagcgaatgatcgtaaggcttacaagaaatggatcttgaagacaattgaagagtcgtggaatttgttccagaaaaagtttgttgaactatggaataaacacaaagaaagcaatggggaggcatacctgcctgatatatacaacaagccaaagcttttgagcgttgttcagaagaagtacatgacaaacctatttcatgatagccttgggtttggttcagccaaaatgatcaggagaatagtcggaatcgctcacgtagaggatctcgagtcaatcaaggatgccagcaagagagcggagtgcgagcgtgctgccctcaactgtgcgaagacgatcctcaagggaagacaccagttggagacgatcgagcaagtcgtcgagcatatccagtccttcgatcaggactgagaagacgacagtctatttgtgcgctgaagcctgaaggagacatactctcgtcaattaacccacgcatgcccgagtatcgatgaatcgtctgttttgtagtgatgaagcgcccggttgtttgtgatctctgtattggttgctaggtgagaaaagtatgtggtctcctggcttgaactgtgtgtacactattattccgggccggcatagcgagcagctgaataatgaaatgtacgggtcctcagtgaccatctcagtgcatataaacacgtgtgttaccaataaattttgttatggtgctggtggttctatggcaaaaaaaaaaaaaaaatgttgtttggttgcattacttgcatatatgaacatctgatccgattcag

SEQ ID NO: 4942 - DNA, 3780 bp, Zea mays
atgagtccgtctcgacagtgaccggacctcttcgttagggttgaccgcctcttctctccgtctgcctgtgctactactagggttagggctccggcaaggcctccctcgcgccggcggcgtcagcagcggatatgggtgttccggcgttctaccgatggctggcggagaagtacccgatggtggtggtggacgtggtggaggaggagcccgtagagatcgagggcgtcaaggtgcccgtcgacacctccaagcccaaccccaacagcctcgagttcgacaacctctacctcgatatgaacggaatcatacacccctgcttccacccggaggacaggccctccccaacaacatttggtgaggttttccagtgcatgtttgattatatcgacagactattcgtcatggttcgcccccggaggcttttgtacatggccattgatggtgttgctcctcgtgctaagatgaatcagcagcgctcaagacgattcagggctgcaaaagatgcagctgatgcggctgcagaagaagaacggttacgtgaagagtttgagagggaaggcagaaagcttcctccaaagcagcaatcacaaacatgtgattcaaatgttattactccagggactgaatttatggctgttttatcagttgctttgcagtattacatccatcgtagattgaattatgatcctggatggaaacaaattaaagggaacataaaaacatgtcccacctggccaacggaatctgtctggttttaacccaaatacgcgccattgcctgtatggcctggacgcagatctgatcatgctagctttggcgacacatgaagtacacttctcaatactgagagaggtagtttatacacctggacagcaggataaatgcttcttgtgtggtcaggtgggacatctagcagcaaactgtgaaggaaaggtgaaaagaaaagctggggagtttgatgagaagggtggtgctattgttcccaagaagccctatcagttcttgaatatatggaccctgcgggaatatttagaatacgagttcagaatgccaaacccacctttcaagattgattttgaacgcattgttgatgatttcatcatcttcatgtgcttctttgttggcaacgattttcttccacatatgccgacgctagagatccgtgagggagctattagcgtgctcgcggccgagtgtacaagaaggaatttccctcaatgggtggatatttaactgattcttgcacgcctgatctgagcagagttgagcacttcattcaagcagttggttcatatgaggacaaaatatttcagaaaagagcacgtttgcatcagcgtcaagcggaaaggataaaacgggaaaaagctcaagcaaagcggggtgatgatctggatccccatgttagggatgaccttattgtacctattcaacgttttcaagggtctcgcctagcctctggggctgtacctgtgccatatgagcagaatggatcccataaagacaataaagaaaggaatagtcgagcccggaaagctgcacgagtatcaacgtcaggttccagcattgcctcagccttagttgaagctgaaaatgacctcgaagcccaagaatgtgaaaacaaagaagaactgaagtcaatgcttaaagatgcacttcgcgagaaatctgatatttttaattctgacaatccagaggaggataaggtgaaacttggagaaccaggatggagggaaaggtactatgaagagaaatttggggcaagaacacccgagcagattgaagaaatacgcagagatgttgttctcaaatacacagaaggattgtgttgggtaatgcactactattatgaaggggttgcctcatggcaatggttctacccttatcattatgctccgtttgcttcggatctaagtggattgggccaacttaatattaaatttgaacttgggacaccattcaaaccttttgatcaacttatgggtgttttcccagctgcaagtgcccatgcgctaccgctacagtatcgacgattgatgaccgatccaaattcaccaataattgatttttatcctacagattttgaagtagatatgaatgggaagagatattcttggcaagggattgcaaaactaccgtttattgatgaagatcgtttgttggctgagataaaaaaagttgagcatactttgacgcctgaagaagcaaggagaaacagtatcatgtgtgatatgctttttgtgaatgggtcacatccactttcgccttatatctactctctcaacagcaaatttgggcatctgcctgacaaaaggagaaatgaaattaaagaaaaacttgatccttctgctagtggaggaatgaatggatacataacactttgcagtggggatccatgccctcctatctttaggtctcctgtggacgggctggaggatattatggacaatcaagtgatatgttcaatctacaatcttccagaccatcataagcacatagcccagccgccagttggtgttatcatgcccaagaagattgttgaagccggtgatctgaaaccacctccagtgctgtggcatgaagatagtggcaggcggcctcatgataatagcaacaggcaaaacccatctggtgccatatcaggccgtcaacttggagaggcagctcaccgacttgtcataaacagcttaaatgctcagggtagggggcaacatagtggcacatcaatgccatatcgaactataatgaatggcttgcatcatctggatgtagcgtcccctgtcagcaatcaaggcatgcgtccacaagtggggcagtctgccggacctcctggttggtatgttcctaggggtagtgtatcaaatggtcaaccaccagcttatgcatcatcaggatcaggtcattatcagtatgaaagttcggggcattcacaatatgaacaaggtaaccatggaaggcaacaatctcacccatatgcaagagatggcttccatgatacacgaggaagggttccacctgcatatgggtaccagcagagcaacatgtatccatcgggtcctggattgtatgggcaacctccatcagcatatcctggggttcatggtggaggctaccaaccccctccatatggcggaggccagcagtggcagcaacaatcatatagttcgtatgccgtgcgaggcccctacggaggcaggccaccacccacaagggctgattcagggtcacagcaaccacagaaccgttatggtgctttagacagaagtaacaaccggaggccttcatctggatacagaagataatagtttgtgacccagtttatgttatagctcaaagtttgttatcagtagagcttcgagtaactcagctaaagcataggcggaatagtctgctaagtcttgtgaccttcaagcagttagggggtggcatcaaagatattgggaggcaaaatttgtatgctagtgcagactttcaggtactagcggttttgatcgccattgaagcagctaggtttgcggcatcagaggttttgcgaagcaagatttgtatactactgttatcaacgggccatcaggtactggtggctggtcgccattctttatctgtagttaccatttgtttagaagatgtcataaacggccctggggcttaaataggtcccattgagaatatttttgaaggacgtttactctgagacttgacaagttttgggggcattttgatatcagataaatgtatgcaggagtgcagttttgatgatgtgtgtattccaagtcattaatt

SEQ ID NO: 4943 - DNA, 2756 bp, Zea mays
ccacagacccaaatccgcaaatcggcaccccggaagcctcaaatccgctctattcctctctccccctctctcccccatcgcaccagcaggcgagcgcgaggcggaggagtagagatggagtcggaccagggcaagcttttcatcggcggcatctcctgggaaacgacggaggagaagctgagcgagcacttctccgcctacggcgaggtaacgcaggccgccgtcatgcgcgacaagatcaccggccgcccccgcggcttcgggttcgtcgtcttcgcggatcccgccgccgtcgacagagcgctgcaggacccccacaccctcgacggccgcacggtcgatgtgaagcgggcactctcgcgggaggagcagcaggcctccaaggccgcgaaccctagcggtggaaggaactccggtggcggaggaggcggcggtggcggcagcgatgcaagtggtgctcggacgaagaagatctttgtgggcgggctgccctctactctgactgaggatgggttccggcagtacttcgagacctttggcatagttactgacgtagttgtcatgtatgaccagaacacacagcgcccacgtggtttcgggttcatcacctttgattcggaggacgcggttgaccgcgtgctgcagaagaccttccatgatcttggtgggaagctggttgaggtgaagcgcgcattgccccgtgaggcgaatcctggcggctctggtggtggtcgttctgggggaggtgggggttatcagagcaacaatggccataacaccagctctggtagctatgatggtagaagtgatggtggcaggtacgggcagacacaacagggtagtggtggtggtggctatcctggttacggtgcaggaggctatggtgctggggcagctggatatggatatggtgctaaccctgcagttggatatggaaattatggggctggagggtatgggggtgttcctgctgcttatggtggacattatggaaacccaggtgcagctggttctggttaccaaggtggacatccaggctcaaatagaggaccttggggcagtcaagctccatctgcatatggaactggagggtatggtggcagtgctgggtatagtgcttggaacaactcttctggtggtggcaatgctctgaatagtcaagcccctggtggacctgcaggctatggaagccagggctatgggtatggtggatatggaggggatccatcatacgctagtcacggaggatatggggcttatggagcacgtattgatagtgctggcaatcctgctactggtggatcatctggatacaatgcaggctatggaagtggtggtgccaactctggctattcaagtgcttggagtgatccttcgcaaggtggtggatttggcggttcggtcaatggaggtgctgaaggacagtcaacttatggcactggctatggcagtgtgcagcccagggttgctcagtaaagagaggcattttgagtgtgcgaaatgaaccagtgcatctgggcagtctatgtattgatttgtcattccagtctctctggttgctctcagcattttgaagattgcccatttgctgcttaaatcagtatttatccgggttggaatgcttgatcctttagcggcttactactagaacgtctagtcaataagtagctaaaatgtggagtagcagtatcttgcggaatgcttttattaatttttacatttagctttatccatctgtgtggtttgccatgagtggagtttcaggttgcttcatctctagttataagctagagtagcttgactacttatgggcaaaattatctagttgtacctctattctacagatcatatatttgtgtttgacattagtatttatgctggatcttgctctacctacattctggaatgttctccatttggtggctgtattgacatgtggtattatcaacattgatgggtttgaaacagatgcaaaccctgaaatatgcaatcatagttacttgatgctgtagctgcttctaacagtattttcaactgtagtgcaagtgtttttatgtagctggaatggtacacccttcaagtatatcaccaagctatgaattccatccatttggtcctagatttcaatattttcaaagcagcagtaagcttattagcagcaagattgtagcgccaagtttctgaggttgaatgggatggcattctttttttagatatgcccaagcaaggtctatgaaatcaggcatttgaaaaaggcattttgcacagtgatttacatgaacaggcgagaagttccaatatcggggttctgacagaatgcaagataccagcttaagtgcttcattttctgaagggtcttgtgctgtgctacaagatagtggacgaagtgcaacatgttggctggatccactttggctgggtctgagggagcatgggccaagatcttgggggctcggctgtgtggtgcaacgggcagcttgcttgcatactggtgatcgtggatgcttgtgatatagcattgccccccaatgtataagtgaacttttagtgctagaggcttccttttgttggcatgatgtctatggtttataggtgcagtagttgcataacacatagtatactcagtatactttgtgtggaagctattgatgcttttctttttgtttaggcatgaatgccatataattgtacattgaattgacatattaagttattgctaaaacacactccagtgattttaaaaaaaaaaaaaaaaa

SEQ ID NO: 4944 - DNA, 2386 bp, Zea mays
aagagatcagtgaagcccagcccttgccttgaagacggcgctcctttcccccaccagcaccagacactgaagggggtaatgatgaagtatcagttcaagagatcagtgaagcccagcccttgccttgaagacggcgctcctttcccttcaagctccgctttcttctcccgcacctggcgatcttcacgatgttgttgttgcacagcaggtccggactgagtatttcctatttggttctatttttagtgcactataatatcgcaagcgaacctacaattggttgtgagctatattggcatatccttccctttgttgtattcccgcgtggggccccccggggccggccggggtgccagcttgagcattccactttgctagccagcatatacttacacgtagctagcttaataatcagcagctggtgcagcaagagtaacagctagcgacgacgaccatatggcggcgaagcagccagtcgtcgctgctgctgcctccggccaccccaagatgggggaggagaagctgatcatccggccggagaaggtgcggttcatagacgtgctgtcgatgctgctcctgaggcgccccatcaccagctacgcattcgtggaggccggcgaccggaccgccgccgacctgggcagcacgcccggcgactggctcgtcgcgctcacgcaggtcatccagaaggcgctcgccggcgcctactacccggctctcgtggtcggcgccgtcgtcgagttcctcctcaacttcgtcgcgctcaacaatggcatactcggcatctttctcaacctcttcagatgtaagctggtgatcccactgaaccgggaggcgcccaacttccggtccatgatcgggatgatcgacgggaggacggagctgaagccgctgccagccagcggcggcccagaggaccggcggctgcaggtggtgggcgtctccgccgccgccggatccggcggcgatgactactacttggacgtggagagcggcagcgcggcggtgccgctggtgcagcagcagtacgtgaacgggcggctcgtccgcctccgcaccttctccgtgttcgaggtgagcatgatggccgccaagatcgcctacgagaacgccgcctacatcgagaacgtcgtcaacaacgtctggaagttccacttcgtggggttctacaactgctggaacaagttcgtgggcgaccacacgacgcaggcgttcgtgttcaccgacaaggcagaggacgcgagcgtggtggtggtgtcgttccggggcacggagcccttcaacatgcgggactggtccacggacgtaaacctgtcgtggctgggcatgggcgagctgggccacgtccacgtcggcttcctcaaggcgctgggcctgcaggaggaggacggcaaggacgccacgcgggcgttccccaaggccgcccccaacgccgtcccgggcaagccgctggcctactacgcgctgcgcgaggaggtccagaagcagctgcagaagcacccgaacgccaacgtcgtggtcaccggccacagcctcggcgccgcgctggcgaccatcttcccggcgctgctggcgttccacggggagcggggcgtcctggaccgcctgctctccgtggtcacctacgggcagccgcgcgtgggcgacaaggtgttcgcgggctacgtgcgcgccaacgtgcccgtggagccgctccgggtggtgtaccgctacgacgtggtcccgcgcgtgcccttcgacgcgccgcccgtcgccgacttcgcgcacggcggcacctgcgtctacttcgacggctggtacaagggccgcgagatcgccaagggcggcgacgcgcccaacaagaactacttcgaccccaggtacctgctgtccatgtacggcaacgcgtggggggacctcttcaagggcgccttcctgtgggccaaggagggcaaggactaccgcgagggcgccgtctcgctgctctaccgcgccaccggcctgctcgtgcccggcatcgcgtcgcacagccccagggactacgtcaacgccgtccgcctcggcagcgtcgcctcggcgtagcttttggattgcatgttcgtttccatgcatgtgtatcattgcatgcaataattggatgaaataaacagcaacaagcttcatcagtattattattgttgttgttgaatatatgcatcctctcctctctatatagaattatagatacatgaggcctggccggccgcgcacgttgctgaacagttgaagcgcttcccaaaaaaaaatgtatcaactgtgaagcatatatatcctgaaaaaaaaaaaaaaacgaattttttgtttttagccctttttgggataaaaatttacaattagacccggaaaacttatatgcattttttgactc

SEQ ID NO: 4945 - DNA, 2162 bp, Zea mays
cccatgcgtccggaaggcgcatgccacggtccccatccccaggaaggcgcaggctacggtccccatcttcaggaaggcgcaggccacggtccccatccccaggaaggcgcaggccacggtccccatccccaggaaggcgcaggccacggcccccatccccagaaagacgcagaccacgatccccttccgataaggacagagttgcgcactcaagggggcaagaacaaaatatagatgatatttccaccgaggccgccgggatcgttggcaataattccccagattctgagcatagattgtcaaagtccttgaggcctcctaactatgaagaaaggaattccacacgtgacagttcttacaagaactcaggcaaacctatacctagtcagggcagcacagatacaagtggagatgaggaacacagtcgtgctagagaaaatgcccggaaagcaaattcatgtcgtaggaaaacaaaggatctctcggcaggtctgcaacctaagaaaatcagtgctggtgactcaagccccagagacaaatctccattcattttacaacagagtggcaaggtcgtccaaaagaaacaccccgatcaattgtcagaatcatcagaagatgagcttgctggtagaagaacaaagcatcaaactgattcacctgatgattctcgtcgaaaacagcattccccgactagaattgaaaatgatgagtcttattcaaagggtggtagaaacagtgagcatgtcatgagaggtttgcgtgatgattctgatgatgctattgatacaaagaaatatttgtctaaagtcaatgaggactcccaatcggacgatggaagtcctttgaaaaaaactaagaaaaaaacagatggtaataggcacattgattctggtagttcagggtctgaagagcctgacaaacatagaacccactcggagaagcgaaggcacaagaaaactcataagcataagaaacagtatgatgatagttccgagtctgattctgagccagatggcaaagacgcaaagaggaggaggaggaaggaagagaagaggctaagaaaagaggaaagacgtcgaagacgtgaagaacgacaccgcagaagggcagaacgccatgccagcaaacgaaaattaaagaacaccgatactgttactatgccttcagactctgagaaggatcgggattctgattcagatggtgatgttaggaaaagagtttcaaacgctggaagagaagagtctgatcagaagaaactagaaattgaactccgtgagaaggcccttgaatctcttagagcaaagaaagccatcaacaactagactgagaaattttttgtgacacatttgagtttctattttcaagtggaagtgtccttatatgaaactatttaatgttctgtgtgtttatgtggcagttgatctgatgattcctgagctgtttacttgatgcagctgaattcaggcttagcagccagttatctggtaatgtttgcttctacagatttgtacgcgaaccataaccctgaaaaggatatgttttgttatgtgagcatctgcttccttttttttcattgtgtgaaatgctcgtctcatgtttctttactagtgtatgatgttgtgttatcgcatacgctgttaaaaaataaccttgcacaatatctttacttgtttattggaaagaaataataataactaagaccaagtactgaatctgaatgtgggcataattgccatgtgcttgctgcataatgctactcttatttattttttctttcacttttgtggacacttagctgctgtatactgtgccactttgttgatttgaatttgggttattggcagattagctccatgtgcacaagctttttatgttcctcaggatgatatgatcaacgcctcaacaaaaacaagttggtaacatattgattggaaaattctgctaaagcattccttcttagtttcaggtttgtgcagcagtcaatattatctgattaataggttctcatatcagaaaacaatttcaggcactcgataatttacgatgcctagggggctagactgatattaatcattactttcagtaacttatttatgatattgactgaagaaaaagaaaccctgtgccaccttctttcacatatggaatcagcaaaccagggg

SEQ ID NO: 4946 - DNA, 1781 bp, Zea mays
  misc_feature (1750)..(1750): n is a, c, g, or t
  misc_feature (1758)..(1758): n is a, c, g, or t
cccgcacaagtcacaacagaacgtccctcccccacaagcagaaggatccgggcggccaccgagagtcactggaagaagctcgtccggcgccccgcgacgagacgacggcctcctcctccgctccgctgaagaacgacctccccgctggacagggtcgcgaatcgcaatctccttccctccttccctctctcttctcccccaaggccccaactgggtcgaccgcttttccgaacccgtgcggccagttactgttcccatcttattcttttggtgcgtgcctggctgcctgcctgccaccgccatcaccaccacgcgcggctcatgtggcgtggcgcagaggcggagcgctccgcagaggcgcagagagaggtggcgtctgccttgctgcgctgcgggtctgcggtctcctgcagattcccgcacccacaaggccagaggcgacccaccagcgccacccaaaaaaggcgcacccctttccgccgcccaaatctccctttaccccgatccccaagccccgccgctgctccctcgtacgcacgtacgcaccgcgtcgccctttatctgctcccgagggccgctggtcggctgctgaatcgtcgccgttgttgctgggactgcagcgttggcgggccttgtagcgaggagggggtgcggaggcgccgcgactgttcgcgggatgagcttcggcggcagcagctccctcgcatcaggtgcgaagaggccgttcgagtacgggagaacgcatgtggtgaggcccaagggcacgcacaaggccaccattgtctggctccatggacttggggacaatggagccagctggtctcaactactggaaactcttccccttcctaatataaaatggatatgccccactgcaccttcaagacccgtgtcagtgtttggcgggttcccctccacagcatggtttgatgttgctgatctttctgaggatgctcctgatgacattgagggaatcgatgcctcagcagcacatgttgcgaatttgttgtcaactgaacctgctgacatcaaacttggtgttggcggctttagtatgggtgctgctactgctctgtactctgcaacttgctttgcccatggaaaatatgggaatggcaaaccattccctgtgaacctaagtcttgccgttggtcttagtggctggcttccatgtgccaggaccttgaagaacagaattgaagcctcaccagagtgtgcacaaaaggcttcatcaatacctcttttgctctgtcatggaaaagctgatgatgtagttgcctacaagcacggggagagatctgctggtgccttgaaggcaaatggcttttccaatgtgctcttcaaggcatacaatagtcttgggcactacactgttccagaggagatggatgaagtttgcaaatggatcacagcaaatttggggcttggcactaagtcatcttgattggaatttgatgcgagaaagactcgcagggacggtgtccaaataataccggtatcttttccaggaggtatatggtttaatagcaaatttgggcttgggtatacggccatgttctagcttttcttaacgcagacgtgtctgcgaatgatgtatgcttataatatctatattttggtctacgtcgatttggttgtggcacggataatgtttgtttcaaatattctgctctgcgaattggaattgtgatgttttgctttcacaaaaaaaaaaaaaaaaacgagactagttctctcctcgtgccaaaanaaaaaaanaaaaaaaaaaaaaaggtaccttg

SEQ ID NO: 4947 - DNA, 3057 bp, Zea mays
aaaaaatagcctattccattagtaagattccaattcctcaaaatgaaaggaaacaaacaggacataagggaaatgccttgttaacatagctatagctttctattaaaactacacttagacttgaagcacaagcagtaacaagtaacaacagaatttctgtcagtagtcatgttataaatcaaacatcaagtaacttcgtttggtgatattgtctgttagtgttttattataatctgtctggtcataatagctaatctaagaattctcttgttctcttttaactttgcaacagattgatgcttcaaatccttttggggatcctacacctttcaaggcagttcttgatgaaagtccagcactacctcagacacatgctgcaccagctggttctttccaacccactgggtacctcgtggccggccggggtgaaccctttccagcctgcttcagccgcaagctttggttttggagacactcttggtgatctcacttttgcaccaaatgctgcacctgagctgcaagatatgtttgcaaacacagcctccttgccttcagaggtagcaccagcaaacccatctgtggttctccaacagccagttcctactaatttctcctctcaggtatctcagccagttgctggcacattgcatgctgctcctacagcatttgctccttctcaggctcctcccacatcatttgctcattctcaggcacctcaggctgcccctgcattttcttattcacaagggcctcatcctggtgctgccatccagtctcaatttccccagactgtcgccccatcatttcctccttcgcaggtgcctcaatctgtaacacccaatctgccaccaggccaatcgaacttttttttgcaatcagcatcagggtctggtattgacagcctgtctggggttcctacccagaatggagcaccatcctacattcccccacagaattctcagttcactgctccggcaaatcaacaaccattgcagccaagcttcatcccacaaactagcacaccagcactccagccggccttgatctctaggggggcatcccagccccttggtgtgccaaattcagtgcctactagtggcagcttcccgttgcagtcaagttcatcagctcccccagaaacaatcgtttctgctttgcaagtcaatcaaactgagccagtgaagaagtttgagcccagatctaaactgtggtctgatactttgagccgaggtctagtcaatctggacatttctggacgtaagtggcctgtcgtcgtttacttttttcccctgcaatgccaacagcttacctttgtgttggctgaccccattgcgtatgttttttttacagcaaaagcgaatcctcatgctgatattggagttgactttgattcaatcaatcgcaaggagaaaaggcaggaaaagaaaatcaaccaagcacctgtggtgtctacagtcaccatgggcaaggccatgggagctggttccggcattggtcgggctggtgtaggtgcaatggcacctcctcctaaccaaatgggtgccgggaggggtatgggtcctggtgccggtgccggttatggtggtggaatgggaatgaaccggccaatgggcatggggatgggaatgaatcaacaacagatgaggatggggatgaaccaacaaccgatgggaatggggatggggatgaaccaacaaccgatgggaggaatgaacatggggatggggatgaaccaggggatgccgatgcgtcctccaatggggatgggtcctggtggaatgcccggtgctggctacaatcagatgggcgcggcgtacggtggccagcagccatacggtggatacaggtgaggaggggctatgcagtcccccacaccacagatttatgggggcgaggtgttgaagaaacggttttggaggcatctgtattttgctcacctggttttgctttgggtatgatttcttgtttcttttgggggtggaggtgagaagggtataattttcgtcactattcttttacagtctatgttggatactgtacctactttactaaatagcaaaaagcaaacatatgaacaagggcggtgctacaactactgcgttgtgttggatgtaaagccttgatatattatctctttcccatgtagttgtggctataggcggcttcttttcagtgaacatattgtctgttccagcgttcttgctggatggatagtaaatggctgtaccatttggttgaattatcatggtttttgctttgatgttagtttgcatgtgaaatttgacatgctttgttcacatcgttattcttgtatcagttactatcgaggaactaaccgcaatggcttagatctagctggaggacagtcgtcattctgaaggaacaaagatcggtcaaaaactaggtcaatttggctaccgaagattgggacgaaaactttgtgcgggagcctgagacatttttgggagaggacttggtagaatgaattccacctccgtctttaaataaatcaacccaaaacccattcatgcaagtcaaactatcttaaaataaatcacctcaaaatccatacaagcaagtcaaactatcttatcttaaaaataaatcaactcaaaatccatacgtgcaagtcaaactatcttaagtttaattaaatttacaggtcaaacttttacaaattttacgtgaaagagagccaccatctatgatataaaacgagtatattataaaaaatatgttctatggtatatataacacgaaagcatctagtccctaatttgatttcggtgattaatggcgtatgttttatagaaacaatgtaaattaggtcatactgcctccatcccataaaatatggcatattttttttttgcaaaatctttagagtgaaacttagacaagtatttttttaaaaaaatacgacattaacaaatataaattgagcatcatattaaagtattttaaatacaaattcaagtatataagatgtatacactattttttcttgaattattagtcaaagttttgaaatgttgacttttttaaaaaccatgtacg

SEQ ID NO: 4948 - DNA, 1201 bp, Zea mays
ctcccgcccggccggcccgggccccgcccccgataggcccgtccggatagtgccaggactgccagcccgatctcgcgtcgaacgatgtgaaagaactcctttcttctacgcggacggattcctctcgtctcgatcagctcgcttcgtgacttctctctcctctcgatcgattgcttcctccaccgaggcgggggaaagcgccgcccagatcgccgtaggcaagcggcgatcactccagctctgagcataagtttctgcagggaggctcgtgaagtcagtagtcgtatctggcagtggcagcacagcgcaccatggaatggctgagctggagaacggtgtgttgtttatcagtgctgtgcaccgtgctgttcttgcgcccggtcgagggcattcgcttcgtgatcgatagagaagagtgcttctcgcataacgtggagtatgagggggatactgtccatgtatccttcgtcgtcatcaaggctgacaccccgtggcattacagcgaagaaggcgttgatcttgtggttaaggatcctaatggcgctcaagtccgtgattctcgagataagactagtgataagtttgagttcatagttcagaagagaggcgtccatcgcttctgcttcacgaataaatccccgtaccacgaaactatagacttcgacgtgcatgttggccatttttcatacttcgagcagcatgccaaagatgagcattttgcaccacttttcgagcaaatagccaagttagatgaggcactttacaatatccagtttgaacagcactggctagaggcccaaactgaccgtcaagcaatattgaacgagaacatgagcaggagggcagtccacaaggcactcttcgagtcggcggcactgatcgcggccagcgtcatccaggtctatctcctgcgccggctcttcgagcgcaagctggggacgtctagggtataaggctccactggtatccaactctcccttgtagtagccaccatgatcgtatcgacataaccgttaatggtcgctagatcagctaatactgcttccttgtgggctttagttacatgtaatcttttgtggtgccacagatgagaactcttcggatttaaaccgtcaatctttcagccttcattttgtcaaaaaaaaaaaaaaaaaaaaaaaaaagcaacaaggctccctgtacagaataggagattttcttc

SEQ ID NO: 4949 - DNA, 1432 bp, Zea mays
cattgggtaccccggccgggccagcgcagcgcaacgcaaacccagacggcccgccagacccagcggtcgcttactcgcatcgcagcgcactcgcgccacagtcggcatcacagaccagatccctgcgggtgcggcggccatggccgagaacttccaactccagggccggcacggcaagtcccgcgtccgcgtctcccgcgtctggcgccgcccggccgcggcggggggcgacgtcatcgttgagtggaacgtcgccgtcagtatcgtctccgactgcctcccctcctacacctccagcgacaactccgccatcgtcgccacagattccatcaagaacaccgtgtatgtcaaggcgaaagagtgcacggaagtggtgtccatggaggaattcgccgtgattcttggaaggcatttcacctcgctgtaccctcaggtttcagaggccacggtgactatcgtggagcgcccatgggagcgtgtgactgtcgacggaaagcctcattcgcatgggttcaaagttggtgttgagaagcacagcacagaggtcattgtaaaaaaatctggaagcctgcttataaattctggaattcaaggatactcgctgctaaagacaactcagtctgggtttgaagggtttgtgacggatcgctataggcttcttcctgatacaagggaaaggatagtagcaacagaagtaactgcttggtggaggtatccctttgaacatgtttcgcagctcccatcgaagccattctgcttcacgcagagataccaggacgtaaagaaagtccttgcagagacgttctttggtcctccggatgttggtgtgtatagtccatccgtacaaaatacgctatacctcatggccaaggaagtccttacaaggttcccagatatatcgtcagtccagcttagaatgccgaaccttcactttctgcctgtcaacttggggagcaaagaagctccgctggtgaagtttgctgatgatgtgtacctgccgacggatgaaccacacgggacgattgaagcaaccttaataagccgtcccatgtcaaagctgtaaaaaaaatgtagtcgtcaggctggtattagactcctgcttcgtctccccagcatccccaggcttaaaatggacagtaagctgtaagggaaagataaactgtcataaatcgtagcccctatgctttatgtgtggtggtggtaataagtgcacagacttgtattggatgttgtcagctgtagcctgtaggcgtccagcttgtgacgtttcgccactgtaatcgtgtacattgctcgtcttgtgtggaaaccagttaatatctttggaagctttggtcagttttacataaaaaaaaaaaaaaaaaaaaaaaaaaaaaaaaaaaaaaaaaaaaaaaaaaaaaaaaaaaaaaaaaaaaaaaaaaaaaaaaaaaaa

SEQ ID NO: 4950 - DNA, 2048 bp, Zea mays
cctcgaggccggccgggaaacaaaaaatcaatgagcaaatacatcgaattgcgcgaaggcaaagcgtccaagcaaccacttctgctctgcatcccgtctgggcctctgcatttgcttggctgctgctcccttctcccaccgaccaactcgatcccgcgccatggatcgcgccgaccccgcgcggggccgccttgccgtgctctcctcccacctccgtggtgcaggggccgaggaggcggcggggctggagaggtcgccggtatccgcgccggcgcccgggccccgcgccggcgcgcttgccgtggtggacgggaggaccgggaagcggcacgaggtcaaggtctccgaagacggcaccgtgcgcgccaccgacttcaagaagattaccactggaaaggacgacaagggtcttaagatttatgatcctggttaccttaacactgcccctgttcgctcgtccatctgctacatcgatggagatgagggaatccttcgctataggggttatccaatcgaagaattggctgaaagcagctcgtttgttgaggtggcctaccttttaatgtatgggaacttgcctactcagagtcaattggcaggctgggaatttgctatttctcagcattctgctgttccccaaggactgttggatatcatacaatcaatgccccatgatgctcaccccatgggtgttcttgccagtgcaatgagcaccctttctgtctttcatccagatgcaaaccctgctctacaaggtcaagatctttataaatcgaagcaggtgagggataaacaaattgtgcgagtacttgggaaggcaccaacaatagcagctgctgcctacttgagattagcaggaagacctcccgtccttcctttaaatactctatcttattcagagaacttcttgtacatgctggactctttgggtgacagaacatataaaccaaatcctcgacttgctcgagctctagatattctttttattctgcatgctgaacatgaaatgaactgctccactgctgctgttaggcaccttgcttcaagtggtgtggatgtatttactgctctttctggtggtgttggagctctatatggtcctctgcatggcggcgcaaacgaggcagtacttaaaatgttaaatgagattggaagcatggaaaatattccagatttcattgtaggagtgaagaacaggaagaggaagatgtccggttttgggcaccgtgtgtataaaaactatgaccctcgtgctaaagtcataaggaaattggcagatgaggtgttctcaattgttggacgggatccacttattgaggtggccattgccctagaaaaggcagcgctgtcagacgaatattttatcaagaggaagctgtatccaaatgtggatttctactctgggctaatttatagggcaatgggattccctacagaattttttcctgtgctgtttgctattcctcgcatgggtggctggctagcgcattggaaagagtcactcgatgatcctgacactaagattataaggccccaacaggtatacaccggcttctggcttaggcactatacccccgtcagagaacgagtgctatcaagccagagtgaggaacttggtcaggttgccacctcaaacgcaactaggcgccgccgtgctggttctgccctgtagaagctgcagcgtataaacgcaccggcatactcaataaacatcgaccacttttgtgcttgaaaaggccacaaatgctttttagcttggttggagttgtaggccttttgttgtcgagtatataggcaataatgcagtgagaacaccacaccgttacaatgtaaaactgtcacgaggcatcacttgctggtgtacaccccttgcgttctctatgacttaatcacttaacttcccaaaagatgaattaagaggtacgatcgagtacccgtgttcttgcgttgaaaaaaaaaaaaaaaaaaaatgagaggtggtggggcacccgccccgagattagtggaaacaaagattcgctgttggcgtaaaaaaaaaaaaaaaaaaa

SEQ ID NO: 4951 - DNA, 2125 bp, Zea mays
ttgggaccctcgggccggccccaattacccgccttccgccatctgacgttctagggtttggcggctcctctatcctttctccatccgctagcaggcgcgaggcgccccctccgaccgacactgaatcccgcctccaacctccgctcgaaacccataccttcggtctcctccgtctgtccgtcgcccatccggccgcctcttctcccaccagccgccgctgccgcacgttagctcctcctgcatcgtcgccggacctccgctacgcccccgtgcatccttgccttggcaggcaggatctggccacctttcgccggcaacagttgggcgccgcataggtaaccgcctacccccgaggcaaggcagtaccccgtcgcccagcgtataagcgcggaaggagggcgcggaatagcgccttttctaacactaatggcaacggcggcggcggatggcccccctgtggaaccgcagtctctgaagaagctgagcctccggtcgctcaagcggtccctggacctcttcgccccggcgcacgccctcctcttcacgcccgacgccgagagcaagcggattcgtactgggtgcaaggtgagtgcggagtacggtgcggtgaaggacctcacgccggagcaggggcgcggtgggcagggcaagggtcctgcgccgccatcttcaacagctttggcattgccaggaacacaagatacaaaagatgctcacggagaaggctctaggaatgccattgtccctgcaccacttatgctgccaaaagcacctgaatctaccatacctggcaaaaatacaactctgtcaattcctggatcatctgacagattttctacatccgcactgatggaaaggatacctagtagatggccacggcctacatggcatgctccttggaagaactatcgggtcatcagtggtcacttgggatgggttcgatctattgcatttgatccagcgaatgaatggttctgcactggttctgccgataggacaataaagatatgggatcttgcatcaggaaccctgaagcttacactgactggtcatattgagcaaattcgtggacttgctgtcagccaacgtcacacttatttattttctgctggtgatgacaaacaagtaaaatgttgggatcttgaacaaaacaaggttattaggtcctaccatgggcatctgagtggtgtttactgcctagctctccatccaacaattgatatcttactgactggtggccgggattcagtttgcagggtgtgggacatcagaacaaaagcacatgtttctgctttaacagggcatgacaacactgtctgttcagtgtttgctcgtcctacggatcctcaagttgttactggttcacatgatacaactattaaattctgggatcttgtagctgggaggactatgtgtacccttactcaccataaaaagtctgtccgagctatggcgcttcatccaaaggagaaagcatttgcatcagcatcagcagacaacgtaaagaagtttaaccttcccaaaggcgaatttctgcacaacatgctgtcgcagcagaaaacaataatcaattcaatggctgtaaatgaggatggtgtcttggcaactggaggggataatggaagcctgtggttttgggactggaagagtggtcataactttcaacaagatcagactatagtccagcctggatcactggagagtgaggcatgcatatatgccctctcatatgacgtgagcggatcaaggcttgtgagctgtgaggcggataagactataaagatgtggaaagaggacttgacagcgacgccagagactcatcccatcaatttcaagcccccaaaggacatccgaagatattgatgctcaaatcccacaagtagcaagctagtggatggttggagcctccacaattgtgtgacccaaactcgcttcttccctgagcccaattgaaattttgctagggtttgctctattgtataatctgatgcctgtactccaccagtctgatgccttggtccaacgctttgaaacccttagactgtttctttgtgatctttgcgttcgatttgattataacctaccttagtaccaaaaaaaaaaaaaaaaaaactcgagaaaaaaa

SEQ ID NO: 4952 - DNA, 1867 bp, Zea mays
aagtagtacgagtaaccaacaatccaatggacgcggcgaaatattggcacccggcagcacacccccaccaatcccgtgtccccacgatccagatcagaaacgcaaaggacaatcgacacggacgcgacgcgaaggcgacgcaccagcaccacctaaaattctaaaaaggcaggggccgtttctccgaccaccgcccgacgaatcagcgcgtccgctacaactccggcgacccccgccggcgacgacccaccagggcagcgatccacgcaggcgaacaacgatgggcggccgcaagatcgcgctgctggtgggcatcaactacccgggcaccaaggccgagctcaagggctgctacaacgacgtcgaccgcatgcgccgctgcctcgtcgaccgcttcggcttcgacgaggccgacatccgggtcctcaccgacgccgaccgatccgcgccgcagcccacgggggctaacatccgccgcgccctcgcccgcctcgtcggggatgcccgccccggggacttcctcttcttccactacagcggccacggcacgcgcctgccagccgagacggggcagcacgacgacaccggctacgacgagtgcatcgtgccctgcgacatgaacctcatcacagatcaggatttcagggaactcgtgcagaaggtccctgaaggttgcctattcaccatcgtctctgactcatgccatagtggtggcctgctggacagtgctaaggagcagataggtaatagcaccaagcagaataagacccagtcccgtgaacctgatgagcctcgtcattctggttctggcagcggcttccggtcatttctcaaagagactgtccgcgatgtgttcgagtctgaggggattcacatccctcatagtcgtcgccatggggatgatgaccaggacgacggttacgcacagccaactggaaatggccgcaccaaaaaccgctccctgccactctcgaccctgatagagatgctcaaggaacaaactggaaaggatgacattgatgtgggttctatccggatgacgctgttcaacatctttggtgatgatgccagcccaaagattaagaagttcatgaaggtcatgctcggaaagttccaccagggccagtcaggtgagcaaggcagtggtggtggtggtgtctttggcatggttggtgcccttgctcaggagttcttgaaggctaagcttgaagggaaggaggaagaggctttcaaacctgcattagagcaagaggttcacagtgttgacgaggtgtacgccgggagtaaggcctgggcaccaaacaatggcattctgatcagtgggtgccagactaaccaaacatcagcggatgcaactacaccgcagggtgtctcctttggtgctctgagcaatgctatccaaaccattcttgcagacaagcacgggaaggtgacgaataaggatctcgtgatgaaagcacgtgagctgctgtccaagcaagggtacactcaacagcctggactatactgcagcgatgagcatgttcatgtcgctttcatatgctaaaacttggattgttacagcgattgctttcctccatccttttgtgttgatcggtgcaccagaggttgatgtttttcttcccatgtatgttacagctatattgtatcagtgtttgttgcttgaggatatgtttcaatggactatgtcaatattgaaataacttttgagaaatgtttctatatatgaataatatacacacttgtatcgtgatctgtaccaaaaaataagctacactaaacatatcagttttcctacattccgtcgtcccagtaaaaaaaaagaaaaaaaaaaagggccggctcgagcacgagccgaattccgagc

SEQ ID NO: 4953 - DNA, 4764 bp, Zea mays
  misc_feature (90)..(90): n is a, c, g, or t
ggtgattattatgctaatatgaactaaaacataattgattctgagtccgaagcaatcaacaactacacttgtgtcgcatgccaacgtgtnagcattaggaatggaactaaaacaatctccaatcccagtaaaaccaacaaactttagtttctatacaaaacgaaatgccattaactctactgcgaatccgtaagtgacgtacttgggttctgattctgataagatttgtgagcatgtatcatgacaggctacaaagaacatggctgcgatacctaagccctagtttcttgcagattgtatccaaagcctctggcagcgttctatcagcaaaatataggataagagttctatacaagatgcaaccactatattagtgccatgaagaggacaaaacaactagaaatttgttacttgttagctctttcgagtagttctttacctccacatattatgcaaccactatgttagtgccatgtttccagggacgggcccacttcaattcataggcattcaaatgaatacctaagtttttgtcaaaaaataagtatatgtagtatataataaacacatattggttaattgcccatacttcatatgacacatatagacataagctctagtggtggagacaactagggttctaatccccacacctttttttttacctgcgcgtgaaattttccatttttttgcctatgctcgatttgtggatgattgttttagcttgacatttagtccttcgctttttcgtttgtgagtctcatatttaattcagctttcttaaaaactagaattcatcttacagacttatacgatatacgattagggtcgatcagcaatctcataggaatgtttgtttatttcacatgttgctatttgtgtcaatattttctgaaattatataaatagaaacaatgtaattctattattttattctcccattacttatgaacattgttgactggttgctttgttatatttattaaagaaaattcttcttgcaagccaaagataaaacatcatcgctccttttcaaaatatgaaggataaaaaaacttgtcatgtaatgtaactttccatattatttaaatattattatcttttatatatttcaagtgttggctctgataactagtattgaagaattataatttttaatcattttttatgctcatgtaagaattaattttgtttaatatatatcagatgtatactataaaattattgttatgtagtaatatatttcggtagtattgctaggctttatatggtattatatatatatatatatttttgctacttactaatttcaactcgccactgcatgtatcagaccccaccctgttcgtccacggccggtcctgccctactttattgaagaatgaaaaaaatggcaatcatttatatgtaggtctgttctagaaacaaaagagaataatcaaactaaaataatcttgtataaaattgaagctaccgcgtagatcaaacgctttagtgacagatctttagattgactgatagagctgctatatgctatacagtacagattcaatttgtcaagctcttgcaaacaagcctctaaaatcttgcaacgtgcccccggccccgagaatgtctattcggtagcgtacaaagaggcgaccccaccgagcaagcagtgactgaggcagtgccccacctcccctgtttctcgtataaaggtgcccgccggcccccccgcggccttttctgcattcgacgccgccgcaggcccgcagccagctcgagcccaaaggagagaacccaggttggcggcggcgctccggcggcgatggactccccctacgctctccacctcgccatcgccgcgctcgtcggcgcctccttcgccgccgcctccgcctactacatgcaccgcaagaccctcgaccagcttctccgtttcgcccgcgaccagcagcgccgccgcaaccgcctcctccccgaaggcgacgaactggaggacggcgaagaggaccctccgccgcactgggatcatgatcgccgcaccctgcccatcccgccgggcctcccgccgctccacaccggccgagagggtaggccagttgtttctccaggttcgactaaaagagttggacctattgttagaccgactacacccaaatcctctgtccccactatcagtgcatttgatagaattgaagattcagatgacgaggaggatcttgtcccagatgccaagaatgatactgcttacttgaccccaaatggtgctattggatcagatctcacagataaagcgagccagaatggggaattaacatcagcaccatcaacgcagatgattagatcccatagtgcaactggcagcctgcatgtaccccagcttaacccaatagcagctgacgttcctgtcgccgttgctgaacacgtaaccttcagtaaaatcaatatcacagctgttgagactccttctcctgatgaaattgaggcatacaaagttcttcagaaatgccttgagctgcgtcagaggtacatattcagagaagaagttgctccttgggaaaaagagatcataactgatcctagtactccaaagcctaatccaaatccgttcagttatgaacatcaggctaaaaccgatcaccatttcgaaatggttgatggcgtcattcatgtgtaccccaataaagattctaaagaaagactctatccagttgccgatgcaactaccttctttactgatatgcactacgtccttcgtgtgttggctgctggggatatccgaaccgtgtgtcatcaccgtttaaatcttctagagcaaaaatttaatcttcacttgatggtcaatacggatagagaactgcttgctcagaaagctgcacctcaccgggacttctacaatgttaggaaggttgatactcatgttcatcactcagcatgcatgaaccagaagcacctgttgagatttatcaagtctaagttgaggaaggaacctgatgaggttgtaatctttagagatgggacctatttgactcttaaggaggtttttgagagtttggatttgacagggtatgacctcaatgttgatctcttagatgttcatgctgataagagtacatttcatcgttttgacaagttcaatctgaaatataatccatgtggtcaatctcgcctgagggagatatttttaaagcaggataatcttattcaaggtcgcttccttgctgagctgacaaaagaagtattttctgaccttgaagcaagtaaatatcagatggctgagtatcggatatctatttatgggaggaagaaaagcgaatgggaccaaatggcaagttggatagtgaacaatgaattatatagcgagaatgttgtttggttaattcagattcctcggatatacaatgtatacagggagatgggcacaatcaattctttccaaaacctccttgacaatatttttctccctctttatgaagtaactgttgacccagcttcacatcctcagctccatgttttcttaaaacaggttgttgggttggatttggtggatgatgaaagcaaacctgaaagacgcccaacaaaacacatgccaacacctgagcaatggactaatattttcaatccagcctatgcgtattatgtgtactattgctatgccaatctgtatacactgaacaagcttcgtgagtccaagggcatgacaacaatcaaacttcgtccacactgtggggaggctggtgatatcgatcaccttgctgcagcatttcttacttcacataacattgctcatggggtgaacctaaagaaatcccctgtacttcagtacctgtattatcttgctcagattggtctagcaatgtctcccttaagtaacaactcactgtttatcgactatcatcggaaccctttcccaacatttttcttaaggggtcttaacgtgtctctttcgactgacgaccctctacaaattcacctgacgaaggaacctttggttgaagaatacagtgttgctgcttcactttggaagctgagctcatgtgacttgtgtgaaatcgctagaaattctgtctaccagtccggattctctcacaggctcaagtctcactggatcgggagaaactactacagaaggggtccggagggcaatgacatccaccagacaaatgttcctcacatcagggttgaatttcgacacactatctggaaagaagaaatggagctgatacattttggaaatgttaacctacccgaagaagttgacaggtgaagagcaggggaattgcagtgaagtctggcggtggcggcaaggggacgagagaatgtgtcaacacgagagactcgtttgcttgcagaggaggtatcatgacaatggatgtcgccaagtcctccgtgtcgaccatatatatatgaagaataataagaaaacacaaatacccaagtatttagaagcgttgaatccagatgtggcatgaggtcggagccaacgtgtacttgcatacgttacgtttatatacatgtactgctctgctgtaatggtgtttcgacgaatgtgtcttgtcattaatgttttgttaggctcgttccaggcttctgctgatatatacgttacgttcaggcccgaactaggtttgggttttcgctttcgctactcgtaggaaatgtttaagtaccggacttcatgctatagggatactagctcagatggctcagattttatgtccagccctattatttatagatcagattctagtttttctttttttaaaaaaaccacacaac

SEQ ID NO: 4954 - DNA, 1286 bp, Zea mays
aagcgtttgctaccacctgggcggccggggtttccatcccattttctctcctctctccgtcgccgcctcgggccaaaccctacgcagggagttgattgatcgattgcagccatgagtaagttgcattccgagcttctcaaggattgcatctcccagatagttcaggatgccaagaagaataggaagttcactgagactgttgagcttcagattagtctgaagaattatgatccacaaaaggacaagcgtttcagtggctctgttaagttgcctcacatccctcgtccaaagatgaaggtgtgcatgcttggtgatgcccagcacgttgaggaggctgagaagatgggacttgactacatggatgttgaggccctcaagaaaatgaacaagaacaagaagcttgttaagaagcttgccaagaagtaccatgcttttttggcatcagagaccatcatcaagcaaattccccgtctccttggtcctggtctcaacaaggcaggcaagttccccactctggtcactcaccaggaatccctggaatccaaggtgaatgagacgaaggctacagtcaagtttcaactgaagaaagtcctttgcatgggtgtcgcggtcggtaacctgtctatggaggagaagcagatccaacagaacatccagatgagcatcaacttcctcgtgtctcttctgaagaagaactggcagaatgtaagatgtctctacatcaagagcaccatggggaaaccattcaggattttctaagtctgtttttttgtgaagtctgctctttatgatatttggtttttgaaccgaggttgtcttgaactaaaactcttgttagatcatgtttggttggtaggatatttgagtctgggcaggtgtcttactcttgcgccatgtctttgtaatctctctatataagttttttgagaggctcagtataatatgcgtattatacgttatacccaatcgtttctgttactgtggaaaatgagtttccgccattgctgctgcgcccttgggtagcgcccctctacttacgggatagagccttgtaggaagtttttggtcactaatctggctgctattactagacattttgtgtaaagcgcaggcctagtgtcttaggttcttacgtgagttgggttaggagaagggattaacctggtgcttttgagtccaggtgctaggatttgaagggtcagtgaggtttggatagcctagtgtctgatggctatacatactatatttataaaaatattgtgtgatgattaaaaaaaaaaaaaaaa

SEQ ID NO: 4955 - DNA, 964 bp, Zea mays
ccggccgggaacggaaggcctgcgctccacggaccacggcaacggggctcgggagggggtaccccggggcggcccgcattcacatctgtagccgcgcctctccgtatcactccgcgcctctctcccgccaggccgccgcccaagcaaccatggtggccgcgctgctccgccgcgcgctccacctccgccgtgtgctcccctcgcccgccgtcaccgccgccgcctcccagcgcctcatccccgccttctcgaccacccccacgccgaccccgaccacctcccagcagaacgccgccaccactacgatcgacctctcctccgacgagagccgccgccgcctcctcaataggttggtgtaccggagcaagcagcgaggttttctggaactggacctggtgctggggacctgggtcgagcagcacgtgcacgccatggacgaggccaacatccgcgccctcctgcaagtgctcgacctcgaaaacccagatttgtggaaatggttgactagccaggagcagccaccagaggatctgaattctaatccggtgtttgctgccatcaaatcaaaggtcacagataacctgaccaagcatgcttctcctgagacccgatctacaccaggtcaaccatgggttagaggatgggacgacataaagaaaggcaaagatggacccaagtatggaaatcagtgataagctgcttgaaatggggatgacggctttccatcctaaataatagctgtccgcccaccccaccccccaatatgcttgttttgtgattgtgtagaataaagtgaactgccaccggcatgtgtgaagtttgttaaattgtagaatcagcttgtaactatggatggtactcctgatgtttgcctggcaattccagccttccaggtatcgtctactacttggaaatatgttatattatgcattgcagtctgttagtgatggcaatcgttgaagcc

SEQ ID NO: 4956 - DNA, 1972 bp, Zea mays
gggacctcaggcggcggagacaacccaagttccaccagacccacacgtttctttaccctaaccttttcgctgctccagcgaagaacacagccaccgccgtttcttcgtcttcctcgcagcgccggcgcgccatctcggtacgaaggcgacggcggcggtgacggcggcgttcaggatcgggatctcagcgacgacgtcagaggcttcccatcccgacccccgccagtcgcctcgcgccctcgactccggactccggtcctccgcacaccggccggttaccctgcgtttgaacctgctatagaaattataaaatggccgcggttgatgcgacaaccaaggagatggatgcactgcatgttggacaaaatgatgaaacaaaagagagactgattaaagaagacaaagctgcaaacagcaatcattctgttgttgcagctcagtccttgccaccagaggacgacgatgatgatgaagcacaagctgatggtccatctcaagatggagcagcagcagctgtaaagaagaaaaagaagaaaaacaaatccaaaaagaagaagggcccccttcaacagacagatcctccatcaatacctgttgatgagcttttcccctcaggagaatttccagagggcgaaatccaacaatacaaggatgacaatctgtggagaacaactagtgaggaaaagagggacctggaacgactgcaaaagccaatatacaactctgttcgccaagcagcagaagttcatagacaggtgcggaaatatatgaggagcatcataaaacctggaatgttaatggttgatctatgtgagacattggaaaacatggtccggaaacttatcaaggagaatggactgcaagctggcattgcttttccgactggatgctccttgaattgggttgcagctcactggactccaaatgcgggcgacaaaactgtgctacaatatgatgatgtgatgaagcttgattttggaacacatatagatggttacattgttgattgtgcatttactgttgcattcaatcctatgtttgatccattgcttcaagcaacgagagatgccacaaataccggaatcaaggaagctgggatagatgcacggcttggtgatgtcggtgctgcaatccaagaagttatggaatcctatgaggttgaaatcaatgggaaagttttccaagttaaaagtgttcggaacctcaatggacacagcatcgggccatatcaaatccatgctgggaaatcagttccaatagtgaaaggtggagagcaaacaaaaatggaggaaggggagttttatgccattgaaacttttggatctacgggaaagggatttgtcagggaggacttggaatgcagtcattacatgaagaactttgatgtcggacatgtgcctttaaggttagcaaaggccaagcaactgcttgggaccatcaaccacaacttcggaacgctcgccttttgccggcggtacttggaccgccttggtgagaccaagtacctcatggctctgaagaatctttgtgacaatggcatcgttcagccgtaccctcccctgtgcgatgtgagagggagctacgtctcgcagtttgagcacacaatcttactccggccaacttgcaaagaggtcatttccagaggcgatgactactgattgcggctggaggaggctccctgtaccaggttgtgtgtgtggagcgccatccgtttatggatggactataggacgtgtcacactcggataaatggtttggtcctccagagttcaggatgttgtatgagttttataataactcgctaaagattgtggatgtacaagtagcagtaatacgttttctgggaacatggacattgttaggctatttccagcggggatttcgtccgagtttcaatctcgattaaatgtgttgccacataagaaaatatgataatatggcaagaatttaataagagagtgagttttattgg

SEQ ID NO: 4957 - DNA, 1486 bp, Zea mays
gggaataaaagggctggttgtcgttgtttttcttttcaagatatcatatcatatattatgatctgtagctttaagctgcgacagtacaaacaatatactcaataacatacacaatgtcacgtcttcaaaatccagtgaaagaacggacaacaaatttaaacaatatattggaatctaaaatgtatctcttttcctgtgaagtacaaacagcgctaccttctcagcattctgaatgatggcatgtcttgaatgcgagaaatacctccgatagtaagctcttgctctaactgaccccgtgtagacttcagaacctcattgaattccatataactcgctcgccttgcaagccattgagaatcaagcacctgaaatgctacacagaaaaggttatcgaaagccacaccgtcatcatcgagtagttgaacaaagtgaacaccagcttttgttctcatttttcctgactgtaaatccagcatttgaactaacatataggatatgtttacgccgcctactgcaaaaggatactcccattcagctctcttaccatctgctttatgcagtagcctgtgaaaggaatctgggtaatttctggcaaaatatattagattctccaaggacatgaacccagctgctctaaaatctgtggatggatcggagttctgccagcccatctccttccagagatctgacttcagaggaggaagttgtctgttagggtaagccaacttccaaagttctttcagggcatcctgatgcttgacagaggagcagtcatatggcacatctatcctttgtctcaacaatcttaacctttcttcctgtaatggactgaggttaactggaagtgtctgtccattttgtgaacttttggaagcagaagagcaaccaaagagtcttgctagcaaatatccaaattcagaaagaacatttactatgtttcttgcagattgagcaacaaaagctgctaaaagatgtgtccaacgaagacactcctgtgccgtcccatcccagaaacctgaccgtgtaataggctcatatgtcttggatttctcttcctgaggagtgtttcctagaagaggttctgttacaggatctgacagtgctgtatccatttgtttttcccctgttgtatcagtctcagcgctgataggccttctttttatagcttttgaggccatcctagccggttgtatgaatcatgcctcgccgatcgagagaccgaagcggatttggggcccgatttccagtctccgcgcttcctcttcccctccttccgcgtgaggtggcgaggtccgaggagggagatgacagaggaggctgggcgtcagcgattcagagatcccgcacctgcactgcactgcaccgcacgacatctgctgcgctcacggcattttttttcttcttctggggtgtttgtacaaatatgttgcgagacacgttcttggcttcgacgagggaggcgagcactgcacgagcccggccggcc

SEQ ID NO: 4958 - DNA, 3314 bp, Zea mays
cattgggtacctcgaggccggccggggtctataaagtggccgccagaatccgcgcctcctactactctgccctctcctggctcctctccttcctgcttggtttttgctttcagctcttgaaccgaatccactgccgcggcgcttagcattggggactagggggccgacatggctgccttaggggcgaagatggagcgtctgtcgtcgatcgacgcgcagctgcggatgctggtgccggggaaggtttcggaggacgataagctcatcgagtacgacgctctcctcctcgatcggttcctcgacatccttcaggacctccatggcgacgacctcaaggaaatggttcaagaatgctatgaggtagctgctgagtatgaaacaaaacatgacttgcaaaagcttgatgaactcgggaagatgataacaagcttggatcctggggactctatcgtgattgctaagtctttctcgcacatgcttaacttggccaacttggctgaggaagtccagatagcctacaggaggagaatcaagctcaagaagggagactttgctgatgagaactcggcaatcacagaatctgacattgaggaaacacttaagaggcttgttgttgacctgaagaagtcacctgctgaggtatttgatgccctcaagagccagactgttgatctggttttgactgcacatccaacacagtctgtgaggaggtcactgctccagaaacactcgaggatacgcaactgtttggttcaactctactcaaaagatatcactccggatgataagcaggaacttgatgaggctctgcaaagagagatccaagctgcctttagaactgatgagatccgaagaacacagcccactccccaagatgaaatgcgtgctggtatgagctacttccacgaaacaatttggaagggtgttccaaagttcttgcgccgggttgatactgcattgaagaacattgggattaacgagcgtgttccttacaatgcacctcttattcaattctcttcttggatggggggagatcgtgatggaaatccaagagtgacaccagaggttaccagggatgtctgcttgcttgccagaatgatggcatcaaacttgtactgctctcagattgaggatctcatgtttgagttgtctatgtggcgatgcagtgatgaactgcgcatgcgagctgatgtgctgcatctctccactaagaaggatgccaaacattacatagagttttggaagaaggttcctccaaatgagccatatcgggtgatactgagtgatgtcagggataaactgtacaacactcgtgaacggtcacgagagcttttatccagtgggcattctgatattcctgaggaagctacattgacaaatgttgagcagctgttggagcccttggaactatgttacagatcactctgtgcttgtggtgactctgtaattgctgatggaacccttctggatttcttgcgtcaagtgtccacctttggactctcccttgtgaggcttgacattaggcaagagtcagataggcatactgatgtccttgatgccatcactacatacctggggataggatcttaccgtgaatggactgaagaacgccgccaagaatggttactgtctgaacttaatggcaagcgccctctgtttggctcagaccttcccaagactgaggaaatttctgatgttctagacacattccatgttattgctgagcttccctctgacaattttggtgcgtatatcatttccatggcgacagctccgtcggacgtccttgctgttgaactcctccaacgtgagtgtcatgtgaaaacaccacttagagtagtcccgctgtttgagaagttggccgatcttgaggctgccccggctgcattggccagactgttctcaatagattggtacagacagaggatcaatggcaagcaggaggtcatgattgggtattcagactcgggcaaagatgctggtcgcctctcagcagcttggcagctatacaaagctcaggaggagctcatcaaggttgctaaggactttggtgtgaagttaacgatgttccatggacgtggtgggactgttggaaggggtggtggtcccactcaccttgccatcttgtcccagccaccagacacgatccacggatcactcagggtcactgtgcaaggtgaagtcattgaacagtcatttggtgaggagcacttgtgctttaggacactgcaacgtttcacggctgctaccctggagcatggcatgcacccaccaaatgcaccaaagccagaatggcgagcccttcttgatgagatggcagttgtggcaactgaggaatatcggtccattgtcttcaaagagccacgctttgtcgagtatttccgccttgcaacccctgaaacagagtatggtaggatgaacataggaagcaggccatccaagagaaagccgagcggaggtatcgactcactccgagcaatcccatggatctttgcttggacacaaacgcggttccacctcccggtctggctaggatttggagccgcattcaagaatgtcctccagaaggacatcaggaacctccacatgctccaggaaatgtacaatgagtggccatttttcagggtgactattgatctggtggagatggtgttcgccaagggtaatcctggcattgccgcactgtatgacaaactcctcgtttcagaggaactgcatccattgggtgagaagctgagggccaactatgaggaaacccagaagcttctacttcaggttgctgggcacagggatcttctggaaggtgacctctacctgaagcagcggctccgcctgcgtgatgcgtacatcaccaccctgaacgtctgccaggcctacaccctgaagcggatccgtgacccggactaccatgtcgcgctgcgcccccacctctccaaggagatcatggactcgaccaaggctgcggcggagctggtgaagctgaaccctggcagcgaatacgcaccggggctggaggacaccctcatcctgaccatgaagggcatagcagccggcctccagaacaccggttaaaccacgaagaggggatcttttttctcctcctgatcattggctctaggtccttcgtattttcgcggattgtaacttcggccacctctctacaccgtgaggaaataatggtggtttctgcaaaagtggtggtaaataaaagggcgacaactatcttgtttttctcatagtaacttataactttacgatgcgataatggaacatggcttgcgttatctgtttctcgtcaagcatttttgcaggca

SEQ ID NO: 4959 - DNA, 5907 bp, Zea mays
  misc_feature (5347)..(5347): n is a, c, g, or t
  misc_feature (5366)..(5366): n is a, c, g, or t
  misc_feature (5410)..(5410): n is a, c, g, or t
tggatcttaatctgtatatattaaaatgaatttagatgtaaattagtttaagttacacttcaatccatatcattatagattaggatcaataataaaataaccaacgtacatcaccgtgtcggcgaggtgccattacgactacttcgaagcgcttggaaacttcctacgttgtgcccctggtatctctactgtctattgtcatcagttgtggtattatacgagtaaaatctgtgtgcagttgcaggattgcaccctcctcgcagtcccagacgagatccccacagacaaagatgaggaaacaggaattgacagaagcagcaggccgcccccacggcgcctcggaccgctcgcccgcctctgagtcctttccgaggcctacgtgtccccgtccgccccgtgctcgtgcccgcctctccacgtgtaacagacctccccggcttttccgacgtcacctcacctccctccccggccattaatcctcgtcccccccgcagtgcccgcacccacccggttgtcatcgtcagccgctcgctccctcggtcactcactcactcactcactcccctctagtacatcactcaccgcccgccaagcgcgaagctgtcactctgctgaccgcttgacagagcagagcacggcacctagccgccctctcaccgacccatggccatgggcggcgcgttccccttccagtggcccgagggccccgcggatcctgttctcgacgacgtgaccttgcctccgctgcccacggcggcgcccgacgccggggtcgccgcgtactacgcggacgcggcggacgtgcacgcgatgcacatggcgctgcccgatttcgcggcggcgctggcggcgatgcggcgggaggaggaggaggccgcgggcatccgcctggtgcacctcctcatgagctgcgccggcgccgtcgaggcggccgaccacgcgggcgcgtccgcgcacctggcggacgcgcacgccgcgctcgccgccgtctcgcccacctccggcatcggccgcgtggccgtgcacttcaccgccgcgctgtcccgccggctgttccctcccacgccttcgccttcgccttcgcctccgcccccggccccgcacgccgccgacgccgaccgagccttcctctaccaccgcttctacgaggcgggtccctacctcaagttcgcgcacttcacggccaaccaggccatcctggaggccgtccagggctgcaagcacgtgcacatcatcgacttcagcatcatgcagggcctccagtggccagcgctgatccaggccctcgcgctccgccccggcgggccgccgtcgctccgcctcacgggcattgggccgccgtccccgccagggcgcgacgacctccgcgacgtcggggtccgcctcgccgacctggcgcgctccgtgcgcgtccacttctccttccgcggcgtggccgccaaccgcctcgacgaggtgcggccctggatgctgcaggtctcgcagggcgaggccgtggccgtgaactccgtgctccagctgcaccgcctcctcgccgacgctccctcgtcgggcgacgcccgggcgcccatcgacgccgtgctggagtgcgtcgcgtccgtgcgccccagggtgttcacggtggtggagcaggaggcggaccacaacaagccggggttcctggaccggttcacggaggcgctcttctactactcggcggtgttcgactccctggacgcggcgagcggcggcgcgggcgacgcggcggcggaggcctacctggagcgcgagatctgcgacatcgtgtgcggcgagggcgcggggcgcagggagcggcacgagccgctgtggcggtggcgtgacaggctgggtcgcacggggctggccgccgtgccgctgggggccaacgcgctgcggcaggcgaggatgctggttgggctcttctccggggaaggacactgcgtggaggaggccgaggggtgcctgacactgggctggcacgggcgcccgctcttctcggcgtccgcgtggcgcgcggaagagaacaatcagagtgacagcaggagcaggagcagcggcagtgaggagagcaatatcagctgcagcagctagagcgtcgctactttactgtaaattccttcggtgagaggctagtagcggggtttactgtaaaatcgcggtgcccgcgatccaaatggttcgattgagagagcgttggcatcggtcgtaaatggcagactgaaaaaaaatgacatggaattctgttaggcatgtcgtcgttagctgaataaacggcactgaaacagcgtccctggaaaacgccattgcaatgcagtcgtagaagctctagaaacacttgctccctcgtccctcccatggatttgttttagagcatgactggatgcttgcgtggcctgctgacacatcgagcacgacaagatgccctggcatttctgagctggctggttacaacagcaacgagcaatatgtgaacctcctcatctatcgaaagaaaaaaaaaagcaaatccacgaatgcctacatctagccctgtttataaccaggaagaacatgccaaatcaacaaccataccaaatccacgatgcgcccagtccatatgccagggattctattctactacaatataacccacatctctgaactagctctgccacttccatgaaaaaagaatcgatttcagcttcaaaccgcaaggcatctgtctgaagtctgaaccaatgcaatgcaatgcaatgcaatgcggtgagtaatctatacactgccccccacagcgaatcacttgctaccgacgatcctgtcttgctatgttgacgcttggatttgcaccgaccgtgcctgctgctaacacgccagatcggtcgcgcgctgacgaccgttgccctgttcaccacacgataaacaacgcaggacagctagccggctgcgatcgaggccgcctccgcaaaagctctcgcgtgtacggttgcatctgtagctttgcaaagcgcaacgattaagtacatgtttttttaataaaaaaaatgaacttgtcacagtaggatagcagtagcaggagtggcacgtgcggcgcacacgcgcacggcatctctctctatctctctctcgggcggtcacagattctcctgggtgcggctgcacctgcacggctgcacgtcaggggaggcgtcccccgagaagcgcagaaaaagcccaagccctcttgcgagccgtgccgcgactagaacgcaacgcagccaggcaggcaggcaggatcagaccgtctgtatttgaaacacgccgtacgactagttgacgctcacatgtcgtggtaccggcccggtctcaaagtcccgaatcatattaaaaaaacacaaactgctgctaacggggagagttgggatgctcaatggtcagtcgcgatcgcaaccacacagcagaggatcacacttttacatgcagcgcatgttgctaacctagtacgtacgtatcccgtagctctagtacgtggacgtagcggcactctgtggtgtgggtggaagagagcttcggttaccgaggcatgagcaggaggcagagcagatgaccggaccaccgccgcgttcacgagccggccggcgcgatgctgcgcgctccccctactctccgccgcatggcagacggacgggacgggtggctgtcacgcaactggcgcgcgcggccgcagggcctctctgcgctctgaaaggcgcgcggcgcggaccacggcacgttcaggcgtacagccttccagactccatactgtcagtgtcccgtgtgtagggtggtccggcctgggtccgtctctccccggccccggctgcgcgcccgattgttactcaagcgctctaaactcacggatccccaagaacaacgcgcgccgcggctgatgcgttgagcaaagccatgaactgagcactgatttgtctactgtctatacaagcctcattagcacattgtccaataaaataatattgtaaggtcagaatatcaaactggcctattagctcagttggttagagcgtcgtgctaataacgcgaaggtcacaggttcgagacctgtatgggccatactattttattttgccacgtacatttttggttttgtccatctgcccattcatgcatttttttggcccattcaggcccagttttatttccaccatcgtgtttttgtaatgttctcttattttggtccacctgcatggcccgttttttccctacactcttaatgtttccgtctcggttgatgaggtcagttgcggcacctgttccaaatataattcgaaacgtttgagtttagattttttttttctgctaatctagcctacaaactaaccctagaaatagaatgcgtgttttttttcttctgtttttgtctcaggcgttggattttgttcgcctcaagtttagaacttgccatagttgcttagccagttagctccatccatccaaacaaccccgtcctcacagaatgttctgcacttttttctgtgcatcatcgtgttttttttcaatccatttccatctcaattgataagccaagccgcagcacccgttgaaacaagaccattatttattgttgagaatcaaaatgcttgttttctttttgcaaaccaaatctatccgtatatctcctttttgaataagcttggatttccgacattggacaattcagtttgtccgcacaatcgtcacccagcttagaaataagctacagcccacacatcccgttaaaggcatgtacaatctagagcactttgctcgatttttcaagtacaagagacgactaaaaaactgtattatacaatcctaaaccattagaacgttaataaagaccgtgtgtaggctggttcgggatgcgtccgtctctctcggtgccggctgaccggcttggtttgaagtcaaaatagaatgggatggagtcgataccgtatattcgattttttagaatcacgccgccactaaaacctacttcggtgtttatctcgtccctacgtaactctcatccaaacattatataaattgtagttgcctcctccattacactatatacatccaaccaaacacacccaagcgctctacactaacggatggcaagaactgcgcgcgccgcggctgatgtgttgagcaaagccatgaacggagtactggtcgatctattatctatacaagcctcattacttaagtttatataaatatagtaaaattttaaaaacaaattggcctattagctcagctggttagagcgtcgtgctaataacgcgaaggtcacaggttcgagacctgtatgggccattttattttatttttctacgtacgcattttttggtccacctggcccattcaggcncaatgttatttccaccatntctgcatggcctgtttttccccgtacactcttaatgtctccatntcggttgatgagcccagttgcggcacctgttcgaaatataattcgaaacgcttgagtttagatttttttctgctaatctagcctacaaactaaccctagaatgcgtgttttttttctttctgtttttgtctctcaggcgttggattttgttcgcctgaagttgagaatttgcgatagttgcttggcaatggcaagttagctccatccaaacaacccctcaatcgataagccaagccgccgcgtcctcacagaatgttgtacactcttttctgtgcatcatcgtgttttttcaatctatttccatctcaattgataagccaagccgcagcacccgttgaaacaagaccattatttattgttgagaatcaaagtgcttgttttcttttcgcaaaccaaatctatccgtatatctccttattgaataagcttgggtttccgacgttggacaattcagtttgtccgcacaatcgtcacccagctggaaataagtacagccc

SEQ ID NO: 4960 - DNA, 3068 bp, Zea mays
  misc_feature (3061)..(3062): n is a, c, g, or t
ggatcaactcatatcaactgaccgagcgcttgtcaaaaaccaaacagaacaaggacccaggcaaaatccactgacggcaagagataggagggagatctcgtgatttccggtggcaaggttcggttttgatcccaaccccaggttcctcaccccgaggagaaaaggatccagattttcttcctctctagtaagttgcagttcgcggtggcgccgccccccgccgcttcctccgtgttgcgcggttccgatttggagtgagggggagcgcgtgccgtgggattcccgttcggatctacggagtgggcagctttcctgctccaattcggtcggccagcaacgaaggcccttgaatcttgttgatgcgcggccagatgcgggaagcgtactgggagaaggtttcttggaatcttcgtccgggctccgtggagtgaggtccctcgcccgccgggatcgccccgtcgtcctatgggctgcgtcagttccaagcaattccacggcggggacgaccatggggacggcaagccgcgccggcggccctcgagcaactcgctgaagcgcctggttagttacagttccagcaagaggcatgaggagttggaggaggaggatgaggtgggggcggctgtggcggccacgtcctcgagcggcggacgccgcgctgggaatgacgccagcacggcgaggctgatccggaagccgccagcactggtggtcgaggctgtgccggcattgtcggaggaggctgccactttggcggttggtgtagttgatgcagaaagggcggttgctgcagcgactgggaatcggaagcggcctcctgcagatgtacatatcaatggcgcggcagagcaaggactgagtagcgttggtgttagaacggagggggaggccaaaccaaggatcagggacgtgcccaatggcgtccagggggagcatgtggtggcagggtggccgagatggctcacagaggtggcggcagaggcggttcgtgggtggcaacctcggagggctgagtctttcgagaagctggacaagataggacaaggtacatatagcagcgtttataaagcacgtgatcttgagaatggaaaaattgtcgctctgaagaaagttcggtttgccaatatggaccctgagagtgtccgatttatggcaagggaaatccacatcttaagaaggcttgatcatccaaatgttatcaatcgagtcggcacgacgacatcacgcatgtcaagcagcttgtatcttgtatttgaatacatggagcacgaccttgcaggccttgcagctaccccaggcttaaaattctcagaacctcaggtcaagtgttacatgcaacagctactctctggacttgaccattgtcataaccgtggtgttttgcatcgggatataaagggtgcaaatctcttacttgacaataatggcattcttaaaatagcagattttggtctagctacattctttaatcccaatcaaaaacaacatttgacaagtcgtgtagtaacattgtggtaccggcctcctgagcttttgttgggttctactaactatggtgctgctgttgatctatggagtgccggttgcattcttgctgagttgctgtcagggaagcctatcatgccaggacgaactgaggtggaacagttacacaagatttttaagctttgtggttcaccatcagaggacttttgggctaatctgaagttatcccgagctaccatattcaagcctcagcatccgtaccgccgatgtgtgaatgatgtatataaggacttccctactactgctttaacacttctggactatctacttgctgtagaacctgggaataggggtaccgctgcatctgcccttgacagtgaattttttacaacaaagccatatgcctgcgatccatcaagtctacccaagtatcccccaagcaaggaatatgatgctaagcttcgagatgaagaagctaggaggcaaagagcagctgctaaaggacaggaagctgaagctggacggaggaagcaacctcctgcacctgatggtaatagtggattgcagcaccgccgagttcagatgaatcctaaaagcagcagttacaagttcactccaaaggaggatgctgtttctggatttccaattgatccgccagcaagagctgctgcagacaatggttaccctcagcgcgttcctctgatgcaagctggccgttcttcctccactctgggtagatcaagtgggatggatccaaaggcccaaagattccacacctcccaaattgtcactactgagatgtccggccaatctactgcatctgggcagcgaggcaatgctcctaagatgtctaacctcggggaaagtgccaggagacaatatcttcgagagcatcggtccagttcaagatacagtcaactcactgctgcggacccttctgacaggcctgaatggaaccatcaattccaagagcggccatcgtcttcccatcggaaggatgatgctgtggcaaacaaggagcatacggtggtgaacgggacaaagaagaacagaatccactattcggggccattgatgcctcctggagtgaacatggatgagattcttagagagcacgagcgacagatccaacaagcagtgcgaagagcgcgccttgacaagggaaagggaaagcacagcggtgagagagaccagtcggagtcactgctgtgtaccaccgggaatctcagggctgatcgctaagttcagtttgagcagtcatcagaagcaaagaaaacagcatcgaatcccttatattttttcggttcccccgccccaccccaacccccaagcggagaggtttttgttctgccagaaactcaaactcctgatgcggtttggtacccaggaggtgggcagctgccaaaagaaaacctgttcctgtagagatttaccgccccagagtctagcatatgcggtctgaaatattttttccctgaagatttgttggttatccatagtcctcaattgtatatctcaaaagtactcacccccaaaaatgaaaaattgatccatacactcgttttaaaaaaaaaannaaaaaa

SEQ ID NO: 4961 - DNA, 3844 bp, Zea mays
  misc_feature (266)..(266): n is a, c, g, or t
ttgccgtatccgtcatgcaatccgctcgcgcattgccgtcgccggcgatcttcttcccttgcgttgcgtcagtgccgataacagtagcagagtaatgagctagcacgtgaactgctttcacgaaccctagcaaccgtctacgatgacaatcaatgcgatttaccccgtaatagtagcagagtcatgtgccgttcggatccaccgcttcaatgttctttctttttttttttcctttccctttgctcgaatctaaccttgcagcttgnaggcaggagaagcagaagaacacaagcgtcaatggcccacttaaaatatctccaagaagtaatggcggcatggcatgagcgcaccaaacaacggctctcgccatttacagtcccaccgcacagctgagccgagtgatgaataaacttaggccggccgggcaaaggggggttgtgtggccccgtctggcgcctgctgttcactctccaatctccactcccctgcttcccacaccggacaccggagctcactcgaggacgctgtacgagcagcagcagcatacataaggcacggcagctgagctggctcctccacctttctgtccatccatcacagcttcgagactcgtcctccatgggttctggcggcgtcagatggaaggctctgccgctgtgcctagctctcgtggctctgcaagcatgcctccctgctcgcggggcggctcccaagacttacatcgttcagatggccgcatctgagatgccgagctcgttcgatttccaccacgaatggtacgcatccactgtgaaatccgtgagctctgtgcagctggaaggagacgcggacgaccattacgccgcgaggatcgtctacaactacgagacggcgttccacggcttcgcggcgaagctggacgaggacgaggccgagcggatggccgaggcggacggcgtggtggccgtgctcccggagacggtcctgcagctgcacaccaccaggagcccggacttcctgggcatcagcccggagatcagcgacagcatatggtccgccggcctggccgaccacgacgtcgtcgtcggcgtgctcgacaccggcatctggcccgagagccccagctttagcgacaagggcctcggccctgtcccggccaggtggaagggcctgtgccagaccggccgcggcttcaccgtagccagctgcaaccgcaagatcatcggcgcgcgcatcttctacaacggctacgaggcctcgtcggggcccatcaacgagacggccgagctcaagtctccgcgggaccaggacggccacggcacgcacaccgcggccaccgccgcgggcgcgcccgtgccggacgccagcctcttcggctacgccagcggcgtcgcccgtggcatggcgccccgcgcccgcgtcgcggcgtacaaggtgtgctggacggggggctgcttcagctccgacatcctggcggccgtcgaccgcgccgtggcggacggcgtcgacgtgctctccatctcgctcggcggcggctcgtccccctacttccgcgacagcctggccatcgcgtcgttcggtgccatgcagatgggcgtgttcgtcgcctgctcgggcggcaacggcggcccggaccccataagcctcaccaacctgtcgccgtggataaccacggtgggcgcgagcaccatggaccgggacttcccggccacggtgacgctcggcaatggcgcaaacctcaccggggtttcgctctacaaaggccggcgaggtctttcgtccaaggagcagtacccgttagtctacatgggcggcaactcgagcatccctgaccccaggtccctgtgcctggaggggacactccagccccacgaggtcgctggaaagattgtgatctgcgaccgcggcattagtcctcgggtgcagaagggtcaggttgtcaagaacgccggtgccgcgggcatgatactcgccaacacaccggcaaacggcgaggagcttgtcgccgacagccacctcctgccagcagtggccgttgggcagtctgaaggcattgccgccaagaagtacagcaaaaccgccccgaaaccaacggccacgctcagcttcgacgggacgaagctcgggatccgcccatcgccagtcgtagccgcgttctcgtcccggggaccaaacttcctgaccctggagatcctcaagccggatgtcatcgcgcccggcgtgaacatcttggcggcatggagcggcgacgccagcccgtcgagcttgtccagcgaccgccggcgggtcggcttcaacatcctgtcggggacgtccatgtcgtgcccgcacgtcgccggcgtggctgcgctgatcaaggccagccacccggactggagccccgcgaagatcaagtccgcgctgatgaccaccgcgtacgtccacgacaacacgtaccggtcgctgaaggacgcggccaccggcaaggcgtccacgccgttcgatcacggagctgggcacatacacccgctgcgtgccctcaaccctggcctggtctacgacatcggccaggacgactacctggagttcctctgcgtggagaacctgacgccgttgcagctcaggtccttcaccaagaactcgagcaagacatgcaagcacaccttcagctcgccgggtgacttgaattatccggccatctccgcggtcttcgcggagcagccatctgctgcgctgacggtgcgtcgcaccgtgacgaacgtcggcccgccgtcttcgacttaccatgtcaaggttacagagttcaaaggcgcagacattgtcgtcgaaccaagcaccctgcacttcacaagttcgaaccagaagctaacctacaaggtgacgatgacaaccaaggctgcccagaagacaccggagttcggagcgctgtcttggagcgacggcgtccacatcgtccggagcccccttgtcctcacatggctgccaccgatgtgagcttcgtttatttaccgtgcgtttagagcaagcaatggagcaggaacctctgggcctgggtaatcaagccagagatccgttgtgtcgcagcggcagcggcagcggcagaacaggttcactaaccaacggaaaaatactgtcaaagctccacatgagaaccgcctttattcttcaatgtattcatgcttattccaaatgttcagttgccagtttgattgtttctacattaatgagtgtacaagaaatggaagcaaatagtacggaaaatttgctgctagcaggtttagctagattcccaaatggtgacaccatcacaagtgcagagttccttgtagttctctcctacgccggcacttcttgcaatcaccgctgcggcgatgccagggtctgatttgtccttcgctgcatacaaagcaatcgaccggccgttcccaaaatcaactggttttgttactctcaatttctccttcggtcctgagaaatgggcttccccgttctctccagcttctagagttcccaggtcaccaagtggttgtttcagagaggtaaaaatattagttcccaattttgatttgaaggagttacgttttcattgttgaaattggtattccttcaaataatgaaattgatttctcaaagcaggtcacttgaatacactgttgagctcagggttcaaaagatttgtgctttccatgttgaaagtcgaaactgtgttccctcagttgcaacaatattttatttctcaagactgatcactcagctaaatacaacacattctctgaaaccttgataaaacataaaaccctttataaaacataatcagccaacccataagaaattgctaccttatctttcccaatgatggttcagtaacaaatatgctatgcaaatc

SEQ ID NO: 4962 - DNA, 5741 bp, Zea mays
tggattgtttgtacatgttctacagtttgcgatgaacatatttctgtttataatattggccaatcgacaatctggatcatttcttgaatcgtcttgcatttctacatttttctgtagagtcgtcctgcagctgaaacagccccaagaccttcatacccatcttcaaaggcgaaaaaagactgggataaactggaagctgaagtcaaaaaggaggtttgatgaagatcctcacttatatatgtatcgatcttattgctagaacttgggtttatcgaatatgaatggggtttcatgatttgtgtctgcatcaggagaaggaagaaaaacttgatggtgatgctgcattgaacaaattcttccgtgacatctacaaggatgctgatgaagatatgcggagggccatgatgaagtcattcgtacgtgatgtttggcccagctaatactggatttggagccaactgtattttatgtctatactcacgtatccttgcccgtttctccaggtggaatcaaatggcactgttctctcaaccaattggaaagatgttggagcaaagaaggtagaagggagcccccctgatggtatggagctcaagaagtgggaatactaaagtttggactgcccatcttttgtaaatccaggtcttggaaactatgacctaattctgcccacccatagtgccatgagcttgcttggttaagtctctgcttttgtaagctttctgtatgacagtctagcgtgtgtctgagtgctacttgccgtagcttttgatggacataggtatgctattatgtggtatcgaccccgaaccatctgtggtatcaaagacagcaaactataatgtatggaatgcctattctttttggtctaagatgtttttcttgtcagcgtagtgtgatcttcacaactgaataatagaaactatgcagggacctatgttacagtggtccaccgttggcacagttgcatttgcgtctctttggtggatgaattgaatttatgggaaaattgatttctacctggcatttatgcatcggcgttttacttggtttcaggtttcaggtatgttgcctggttcatgcgctcaatacagccaggtggcacctgaattataggagtacatgtacaaaactcaatgcgcaccgacttctcggagattacgcaagcacgatatacaacggaaattcatcagcccgttagttttcggggtcctgtttgtcagaaacacgcacaaaaaagacgcctatacatagaatctcttcgaggcgaggtcttttcgtcctccattgccattgaaggttctgatttctggcgttacagcgcccacctagagggagagccggcgtcccagtacgccatcttccgcctcgatgacctgctcgaaatcgaagtcgtcgtcgacgggcgccaagagctcgtccaggtccagcccctcaggccagaactcgctgtcgtcgtcgacggccgctatctcctcgccgccaatctccccggccaccgttgacgtctcgctgctgccatgctcgcggtcgccggtgccacggccggccgcctgtccaccatgctcgtggctcttgggagaggaggccgcgctgtgctcggcggccgcgccggacgacggcttgtggcgagtggtgcccgcgagcgcgttgagctgcgtgggcacggggtggcagtgctccgccatgtaggtgacgatgagcaccccgggcttcgctgggctgcgctccaccagcttccgcgccatgcaccccttcatgctgctgcacttgtagtaccccctgcggccacagatcaattcccatcgcaacagtcgcgttagttcgctgagcgtgcgggccagcagccacagggtcaactgcaagcacgcagtacggctatcgaattacagtatcttgtacgtagtactgtactgcaaaaagcttgattggtgatgtccaagtggctttggcgtctcgctcttgtggctgaattatcaaagctcctaattacactagctaggctaggacacctatgcgaagcctcaaggatggcatgcatgccatccctttcttcttgtttccttaaagaaaaggtgccttcttgtttccttaagaaaaggtggcaataattaaggtgttgggagtgattgagtcaacgttcgacgataaggccacctataccagctagctagtagcaggcagtgagtgcaacgcgtggaaagcatgttaaggcgaggtcaaaggtagttaccgcggataaggcgagcccttgatgggcttttggccatacttgcgccacgcccacgggtccgacgacgacgagccgccgtcggccgccggcatctcccgcaccaccttcttcagctggctcttcttgctgccataccacaaccagggaagaaaaaaaagaagagaaaagcaataagccatcatatcatcgcaccaccttcttcagctggttctactactaccgttctatgctgcacgggacgaccggtacggtaccttcttttaggccgcgaagtgcgcgcgccgggcttccggcctggcggcgacgccctctgctgcgtcccggacgtggacgccgccgccgccgcggggaaagagatcatcacctcgcgctcgcgcccgccggcccccgcccgcggccccggcgacggcgacggcgacggcgcggccggcagcaggaacggcctgtggtccaagtccaggtactccaggtcgtacaggagcgccgcggccttagccgcgggcggcgacgcccgtccctgtcgccggacaggcaccgtcgtcggcgtggcacgggcggcgggcgcctcgtctcgccgcggcgcgggcaccggctccggcgctgcgtctggctgatccgccctcggcgccgcggcggcgggctccgggtgcgccacgctgccgcagctcctgacgacggcctgcaggtcccagtcgttgaagtgctccgccatgagcagcggctagcatagcacgccgcgcatgaaccacgacgggcggtctctcgagcggcctttggcgaggcggagggccggccgggacgcgtgcgtgctgctcgctccttgctcctgggggggactggcgggcagggagaagggggtggggttgacttttggcagtgcgagtccagcagggccccgcatatatacgcgtatgagaacgccgagtatttggagacgcggcacggcgcgggctctactctaccggcagcgcagcgcaggcccgatctctgcgatgggatgcgatgcggtgcgaggtcaacccgctgcaaagtggtgggcacggcggcagggattgaaaaaaggagagagatcgcgcacggatttgcatcccctaggcgagggaatagctgggatgggatgctactgctgctgcagtgtcgccaagtacacttgtcaagagggagcggtgccggggccaggggcccacgtctgtcgatgtcgtcgtcgtcgtgcatagcttaggcttggctttttcgtgttgttcgctttgactctgctccaaatgtcaaaagggagaggagagagagagagatagagatgtgctggaagattcgagccctctgtcgcccgtggcataaagaagcctgcagtgcaggctgaggcgtgggaataaaccggaatttataatacggtgatgggggtgaatcgtttttttacacacttcgggacccttttttttaatttatatgtacgttatttcggtccctccctcaggcagtatcggggccgcgattgactagtaggcaggcgtcagtttattcttgttccgatctgaccctgcgcaaatgtcaaagggcaggcagagacattgttgctgcgtgggggccaggcggtcaggccaatcgacgcggcggtgagtggtaaaagcgtgaggcgcttttggacacgacaacgacgcgcgcgccagacgcgcgagagcattgttgctgtcttgctcttgccgccgtgcgcgtgccgtcgatgccggggccgggacctggagaccgcatgctttatttgtgccggccgcggcggcgacgacgacgacgacgacgaccgagatcggtatccccgcttttctcgaacggtcggtccactgcaggtgccccatgccacgacagcagcagcagcagcaggagcagcgagccacgcacgcaagtaggcacgcgagtgcggcgggtttttggataagtttggtgtgccgaatgcattagccgaggcggtgcgtgcggtccggcctgtccgcgttatatcgctccagcttgttaggtctgggcgtgctccagctccgcaggcgcgcgccactgcaacgaatcgatcgataatggatggatggttgacacgtgactgcgtttgtcgcgatcggctacctgacttcggttgaagcaaccgactgcaggtccaggtcccggtccggtccatacgcaccttttttttttcaaatggctgccctagtttgttgaattgtgtgtacactggtaggtgtcaagcttcccggccgggatttgtattctttcccccccttcttttctttttacaacgattttattcttcttccaaggacatggccaacaacgtgggggcggttttggttacggtcttcgacacagattattgcctggcttctaccattttcttaattacaaatgttttggatggaaaccagttcaaatatctgattatcagtcggtgcccatatatgctgatggagcccgttatatgaaattactatacgaacggttcaagaaaacaacgtgtctacgtccttgtctctcgcctctcagaattccaaacatcaactcaaccgcgcgcgcctgtcccggcccgccctttcaaatttaacccgaacctaggagtttctctccatgcaaacgctttgtcaccctaagggctaatttaaaaccattgtcttataatatactttgcaattgttatgataattgaccagctctaagaatactatctattgtttgcatacactactgtaaaccatgaccatgtcatgcaaactttagtttcgagtggaattttcaataaaaaaatatcatagtatttacaatactatacttttgaaaacctagttttttttaaaaaaaaatgcaactaaacacctcaagacataaaatactctgtatttctataaaccatggcattacctagaaaccataaaaatattgtacttccaaacaagtcctaaggagatgttggggactgctcacctagatagaccggtggcgattagaagttcagtggtcacctagagagccgtgggtgaatccacttgatgtgaacacgattatggttggttcaccatgctagagtgacaaagaattagtccacagagagcacctggtccttgcatggtttaatggggagccacacccttgcgtgggtggtccaatgagaactggtgaatagtgttgactctttgatacctcaggaaagcaccgtgacgtttgtaatccattatttactttgaacattttacttttgagcaattacattcaaatacttatattgctagaattgccatggtaatataagattggaacataagatgcaaaacatttgatggttacatagaaacacttcctagacataataggtgaattgggatcattgataggttttaatttatgttgcaaattttatacaaactcacttcatcatttctcttgagcatcttgatcctttcaaagacctagatatcactattagtttctcctataactttcgattctagccacgaatcagtagcggtatactatt

SEQ ID NO: 4963 - DNA, 3404 bp, Zea mays
gccggccggtcctggactgcaatctccatgcccttccttccttccttccccacacaccatctctctttcacatggaggatttctttcccttctttcttcccacaaatattcccaaagaatcttctgtgttgcttctctcctcggattcctcttcccctcctcgcctcccactccaattattcctctccttactgacttgcttcgcttctctgttatctctgtcctctcctcgtgtttgttcttcctaccagcggagcgccagctacgcgctgtgcctcgtgcctagacgaacggcataggcaccggacggtggcgtcatgtgcgtggaggagccggaggacgccgaacggtttggttttggagacccaggggtcgaggagcccgctaagtttcccttggctcagatggagagagtttgtgaaaatacaacttctgctgatttcaggcagaagttaagcaattttgtcccagtaatccgatcgggggattggtctgatattggaggtcgccaatacatggaagacacccacgtgtgcattccggaccttgctaagaactttggtttcccatcattagataatgaagttgtttcattctatggggtctttgatggtcacggtggaaaagatgctgcccatttcgtttgtgataatttaccaaggatgattgtggaagattcagatttccctcttcagcttgaaaaagttgtgagaaggtcctttatgcagattgattgccagtttgctgagacatgctctctccatagagcatcgtcctccggtacaactgcacttacagcaatggtttttggaaggtctcttctggtcgctaatgccggtgactgtagggcggttctttcccggtgtggcaccgcagtcgaaatgtccatggaccacaggccttgcagtctcagcgaaaaactgcgcgtagaatcgcttggtggctacgtggacgatggctatctgaacggtctgctaggagtcaccagagcgcttggtgactggcatctcgagggcatgaaaggagctggtgagacaggtggtcccctgagtgctgacccagagctcaagatgaccacgctgacgaaggacgacgagttcttgataattggcagcgacgggatctgggacgtcttctcgaaccagaactcggtggacttcgcccggaagcgcctccaggagcacaacgatgtgaagttgtgctgcagggaaatcgtcgaggaggcgatcaggcggggggctactgataacttgactgcagtgctggtctcgttccacctggaggccccgcctcggatcagagtggaccgtcctggtagggtggagaggagcatatctgctgaagggctcaatagcctcaggatactcctgggaaggcagtagctgcgttcttgtcgcgattttaggtgctgtgccgcattgccgagttgtaattgtatgtagtcatctcggctcctcattgtcgttagctgttacccgttgctgcgactgcgacacgtgttacgattcttgttggtgattgaaccaacaaacctgatattattcttgttggtgattgaaccaacaaacctgatactattcttgttggtgactgaaccaacagatttgagctccgtcctgtgagagattttaagcagatgaaagtatatctggcaaagaagctgtgagttcccagctcactgtgtaatgtttgccttccgttatgtaacaaaacaaaacaattcattgactgaaatgtgtcaggactgggtcaaatttcctgttctcgcacgactgttcactcgggtggtctttctcccatgatacaaaaactatgaagctggacacggttgagaacaatgtaagcaacagaatggttcggttgcggaaacaccggccgttgtcgcctgaccggtgtcgtcggtttgcaacgaggtcaaaacaatgccttttcgacatgccagtgaaacaaccgaactgacaagttcgcctgtacagctgtactttactcgaggaatgcactggggggaaaaaatatgcgcgctcgtgtacattcctctgcagacaagcgcacaagtttctaggggcagatgtatgtcacacctgagaccaggcagagtacttgccaagattataattctctttggtactttcaagcatgcattggcacctaatcaaggggggcaatggcctaaacaaggcccatattgtgggtagacacacctctgcaaaggccggcatagagaacataaactattgccacgtcttcgcattggtacttcaggcaacccctctgctgcagacatgagcacgccgatcactggatggggctgggggccagggtagtgttccagagcaaagatgtatatattcatctgagtcaaatggttcagcttcaagcagtagagaccacagctcttcagtcttctccattccaactgagcttcatcaccgaactggtccaagaccctcgcgcagagacaagatgaagaagagttcctcgccgttggtggcggtggcggtcgtcattgttctgttcctggtgatggcaagggtgcagggtattcggctggatgcagagagccatgaggcattcagcaaccagatggttcgtgtaagtaatcgtcattcgcgtgcgcattttgtactacacacagtgcattgactctttccgcagttcattaactgtagtgcgttcttgattatttcagaaacccggggagatgggagcgacgtacgctgacagtgagtcgcctggtgaaaaaatggagggaagcatctctgaagagaaagatagagctggccacggtttgccggagattcatgtggattactacggtccaaggggtcataaatctagacaccactgagcagataaaataagatcatctgttctttttccccctatcttcagatgcacccccttaaactagtgagcgcatcacttgaggctgcctactctagcagatagtaatacttaggatgtaattcatttattgtttcccctttgaagagggggaagaaacaccactgatgtactaattcttgaaggaaaaaacaatcaagaaatagcaaattgcatgattattagagagctgcagctgggtgtccaagttccaaagcaactgcggtattcaccatgtgtatctgttctttaggccaaacacttagtaagtttatttagcagtttatttacaaaagctagaaatatcccacgtctatattaggacaaaaagataaaagatagtcgtagttcactttttggtccgctttatggggctagggacggtaatggatctcgatctaaatgtttcttcacaattcgttagggctccaaaaatattttagttcagaaatgaatagaaatagagaatatatttttatagttactccaaccaccaattcctaaaacctgatccgaccctg

SEQ ID NO: 4964 - DNA, 2188 bp, Zea mays
gcacgagaccattacctagaacatcctgacgggatagagacaaccggcacccgccgatcgctcgctggtgggatgaagaaatgctccggcgtgctcttcatcctcacactcgccgtcgtgctcttcctcctctcgccgtcgccctcccccactccaccccccaacaccgcacccaatggcccgatcaccgacctcctccccaccctccccggcctttcggacctctaccctcccgctcccaactccactgcacatctctcctggggcctcctccgcccgctcctctgccgctccgacgcgctcccgggaacctctgcaggcgtcctcgaggcagccgaagcctggcggaatctcaccctggctgtcaccgccgcggcaagcgaggaggaggcgcgtctccaaggactccgctgctcatcgtccgtgggaggggatctacgcacgggacgtgccacactcccctgcgggctctcggagggcgcggcattgacggtggtcgggattctcagggagggggcggccaagttctgggtggaaatgctgggtgcgaacggtgaggttgtgctgcacgtcaatgtgagcctgggagccgcgggggtgttggtggagcagaattcctggacgccagaggaggggtggggggagtgggagcggtgcccgcctgttggtgatgtgagcagcagcaatagcagcttgcagctaagtccagtggacggccttgttcattgcaatgagaaagtgggtgcaaggatcgtccaggagagtaataatactgtggtaaatattactgggaaccaacctgaagattggcagagtcaaacaggacatggtcagttaagtggacgtttctcaattgttgaaggagagccttttacagtaacactgtgggctggtgtagaggggttccatatgacagtaaatgggcggcatgagacatcatttgcctatagagagaggtcagagccatggttggtagcagaagtcatgttttctggtgatttggagctcttgtcattcttggctaatgagttaccagtatcagaagatatagacatggaaaatgttgcagttttgaaggccccacctctgccaaagaagcaaacttttctgctggttggtgttttctctactggaaacaacttcaagcggcggatggctttgaggcgaacatggatgcaatatgaggctgttcgctcaggcgatgtagtagtccgttttttcactggtcttcacaagaatgagcaagtcaatatggagttatggagagaggctcaattatatggtgatatccaattgatgcccttcgttgactactatactttgatcactttgaagaccatatcaatttgcattttcggaacaaaaattgttcctgcaaagtacatcatgaaaacggatgacgatgcttttgttaggatcgatgaagtgatctcgagcctaaagaagagcaattccaatggccttctttatggtctcatttctttccaatcttccccccacagagacaagggtagcaaatggttcatcagtcggaaggaatggcccttcgacatgtacccgccatgggctcatggccctggatacgtaatctcacgtgacatcgctaagtttgtagtccaaggccaccaggaactgactcttcagcttttcaaacttgaagacgtggcaatgggtatttggatccaacagtacaagaacagtgggcagcaagtaaacattgtgactgatgaccggttctacaatgaaggatgcgaagctgactacgtccttgcccactaccagaccccgaggcttatgatgtgtctgtgggagaagctgaagacggaatatcatgctatatgctgtgaatagcatccgaattgcaagtaggaggcgatagaggaatggatagatagaggaatggataggttagccttggttttgaagaagacatttgctccgattttgacgctgtgtggaaaattgttgggactatgcgcaaaaagcctgtaacattgggttctcacttctgtgctgtggcctgtgggttcatgttctttgtttttgggtagaaaatgttaatccgtgcaacttgatggatgttgtaaaaagagtgttgtaggacatttgagagagtttatctggcacaacctctcaagttattggatccatatacacctgcactcgtcctataaaaaaaaaaaaaaaa

SEQ ID NO: 4965 - DNA, 1914 bp, Zea mays
gcggccaccggcttattcaagagcaccaaaaggggtttcggcatggatggatagcacacagcgagcgagcgagagcggtgagcccggccaccagcgccggaggccgtcgtcgtcttactagccgacgctcgacttgggcatgaattgctagccgcgcgggtgagagattgctaggtagccagctaggtacggtgtggggagttgaatcggaggtctgccgctcgaggcggcggcggcagaaggccggtaggatgaagaagctccactggctggtgcggttcctgttcgggccggtgccggtctacttctcggcgctggccatcctcatcgtgctcaccaacgcgcagtacttcgggctggtgggcgtcggcgtggcgccgcgcaccgcgaagctggcctcctcggcgcccgtggtcagcgtcatgaagtactgcgacatcttccgcggcgagtgggtgccggacgcggaggcgccctactacaaccacaagacgtgccacatgatccaggagcaccagaactgcctcaagtacggccgccccgacctgggcttcctcaagtggcggtggcggccctccggatgcgagctgccgcgcttcgacccgctgcagttcctgcagttcgcccgcgggaagtcgctggccttcgtcggggactcgctggcgcggaaccacatgcagtcgctgctctgcctcctgtcccaggtggcgtatcccaaggacctgtcggcgaacccgtcggaccagaacaaggtgtaccactaccgggcgtacaacttcaccatcagcatgttctggtcgccgttcctggtgcgcgcccgggagcccgaccacgacggccccgcgcacacgggccactggagcctctacctggacgagcccgacgacaagtgggtgtcccagatgccccgcttcgactacgtgctggtgtcggcggccaactggttctcccgcccctccctcttctacgagcggcggcgcctcgtcgggtgcagcttctgcagccgccagtacggcgtgcccgacctgacgctctactactcgcagcgccgcgcgtggcgcgtggcgctgcgcgccatcaacgacctggagcgcctgcgagggcgcgtcatcgtgcgcatgctctccccgatgtcgcacttcgagaacgggacctgggaccacggcggcgactgcaggcgcacgcagccgctgcgggcgaaccagaccgccatggagggccgcgacctgcacttctacaccgcgcagatggaggagttccgcgccgcggagaaggccgccgccgagaaggggcggcgcctgatgctcatggacgccacggcggcgatgctcatgcggcccgacggccaccccagccgctacgggcactggcccaacgagaaggtgcagctctacaacgactgcatccactggtgcctcccgggacccatcgacatctggaacgacatgctcttccagatgctcctcgcctagcagcaagcagcaaagattaaaaaaaaaactcagcaattcggtcgccggtaaccgtgcacagattggccttcttttttttgccttgtttcgtttttttaaaaaaagaagaaaatggtgcaattttgacaagcaaggattcgaaattcgccggtaaccccccgagatcatccgttccctcctctgcttgttctgtggtgtcgaaattgctccctgtctgtcggtcggcgccgtggaaaggggcaaagcaaacaaccaaaaagggccgctcgcagtcgcagcggtggcgcctttgattctgttgtagagtagtatatggctggcgcatgcaagctgtcgaaaaaaaaaggtcacggccgtcctctgatcttcgaaccgaattgaaatgaaagttcactcccgcgccgcgcgtatcgtggccccctcactgccatcgttggctgca

SEQ ID NO: 4966 - DNA, 3611 bp, Zea mays
tcaaccctatcccaagtgttgccccgatgactggtgggacagctaagaagaagtcaactgttgggcctatcgtcggtggagtgatcggaggtttggtggttcttgcacttgggtattgctgcttctttgtgatctgcaagcggaagaggagtgctgggaaggatgcaggcatgagtgatggacattctggttggctgcccctgtctctttatggcaattcacacacttccagttcggccaagtcacacactactggtagctatgcttcatctttgccatccaacctgtgccgccatttctcttttgctgagatcaaggctgcaacaaacaactttgatgagtccctcatcctcggtgtgggtggatttggcaaagtttaccgtggtgaggttgatgggggaacgactaaggtggctatcaagcgtggcaatcccttgtctgagcagggtgtgcatgagttccagactgagattgaaatgctgtccaagctccgccaccgtcatttggtgtcactgattgggtactgcgaggagaagaatgaaatgatcctggtctatgattacatggctcatggtactctccgcgagcacctgtacaagacccagaagccacctcttacctggaggcagcgtttggatatctgcattggtgcagctcgtgggcttcactaccttcacactggtgcaaagcacaccatcatccaccgggatgtgaagacaacaaacatccttctggatgagaaatgggttgccaaggtttcagattttggtctgtccaagactggcccatctatggaccatactcatgtgagcacagttgtcaaaggcagtttcggataccttgatcctgaatactttcgcaggcagcagctcacagagaagtctgatgtatactcttttggtgttgtgctgtttgaggtcctctgtgcacggcctgccttgaaccctactcttccaaaagaggaagttagcttggcggagtgggcgttgcactgccagaagaagggcgttcttgatcagattgttgacccctacctgaagggaaagatagctccacaatgcttcaagaagtttgctgagacagccgagaagtgtgtttctgatcagagtattgaccgcccttcgatgggcgatgtgctctggaacttggagtttgcccttcagatgcaggagagcgcggaagagagcggaagcctcggttgtgggatgtcggacgagggcactccccttgtgatggtcgggaagaaggatccaaatgacccgtcgatcgaatcgagcaccaccaccacaaccaccacttctttgagcatgggcgatcagagcgtcgcgagtatggactcggatgggctgacgcctagcgccgtcttctcacagatcatgaaccccaaggggcggtgaggtaaagctggtcccattcgttaccttgcattcattcagcatgtttttttcacgagttcgtgctgttacggttctctcgaattaagaaccagacgtccgagaattgtttcatactagatattctgccttgccctatacttcttccccagtattgcaacgactgtacatctgttggcttgtattgtaccgctgctattgacccaactagtattttactttatgagaaagtgatgtgcacgaactattgttatgagtggtcgtgtgacgtgctgttaggaaggagtctcgactctgaattcgacatgcacacttgataatcagttttcaatctgaatgggttgcgagagctgatagatcgttgtcagaactgagattgtgtcggtctttgccctccagatgaattccaactgtcaaacaatttttatagaccgtttctgacgactaatcgagctggcagctgagatattcttcctttagacaaagtgattcttagaaagctgtggacatttcacatcggattgtaggcggttcacgttaaggtgttatggacactaatatactactacctccatcctttttatttgtataaaaatgaactgcaaaacgtcaaataaaaaaatggagggagtagttttgtgtgtgtgtgtgtagtgggtgttcattggttgtgtgatggtgactaacaaaatatggcgggttatgcttcatatacctcttgtttcgtgctgtatttgggaaagatcatgtaaccaatgctgatgacgcactggatcgtgcccttttagttccactgtcttggcactcactggcagttggcacttctctttcgcaagctcggtccttggacccatctgagctgggaggttgttgagacggttgtttcggtgcagtcgagaaacgctgccgaggtgacgggagagaccccacagtttcggtctcgggcccggaacagaggcgacgaacagttttggtttcagaaccatatggctgtttctctagatagctcgatatgattgcgttgttgattcccgtgttcgcgtccgctcatgtatcagtcatgtgcccaatgatcgtgctctactcccatctctactcccatctgtgagctgtttcttcttccgccttctggccgcacccaagcggtacggcctggctatttcaaattccagcaagaagctccgccagctcccattatccttccgataagactgcgtcggcatcctgatatccagcttggaatcatgagtaataacaaacgacgtgtgtcagtgttactctgcaatctgcatcagttatgcgcctaacgttgtgatgagcaagtcgtcggactattcgctttagattagccgactactgcagctctaatatatagaaacaaaaaaaattataaaaacagtaaaaataggtacaaattaaagtcaagcgattaggccgcatctttaaaaaggaaaaaaaagattggtgatgatgaagtatgtccaaagattcggtgttaaataataataccggagcctgatcgacacgctccagtaacttatcttctggcccgacatcgtctacgccgtccagcagttgtgtttgtatatgcacaccccgcgagagcccatcttaccgtccaagtggattctacgctgcctccgtagctccctcgactatagcctccttattcgatcatccccgacggactgctatatgtttcttcaactccatattttttttttaaaaaaaaagcaggtgtccgcgaacttaaaatgaatggtaggttagaatttgtattagatagttgttactgcccttgttctttgtggagaatcaacaagaatggcttaccatttttaatatattttttctaagcttgctaaaaaagttcttttttatttgtgtgtgtgtgtaatttcacttgttagatgaatatgtcatatgcaatggctgcaagagtccggataccattctttctaaagagaacagactgttcttcctccgatgcgagcaggtaaattgtttcataatgttagcattcccaattctctctggtttcgtcatgtgattatttgtcgcgtaatatcattgtcctattatctgaagtgcttctagattaaacactgcctatgtgcgttcttgcctgatcggcatggcttagtgtccttggcaaaagcttgcttcaatgagaagttgaaaactggaacagtactgaacagtactctggaatggata

SEQ ID NO: 4967 - DNA, 5788 bp, Zea mays
  misc_feature (747)..(747): n is a, c, g, or t
  misc_feature (2785)..(2785): n is a, c, g, or t
tgcccgtctgtagtactttctttatttctcctacttaatttccatttatctaactttaatccctgcatattcatacttagcaatcatgttagtccacattattgtgttggtcattaataactaaaatatttatagaaatggtcctaagcacatttccctttcagcaggtacaatcttgaccatctggatcaggttttcaattacataatacaaataagagaccattacaaagatattttaaaatctagtcacatcataatatagctaagaaccaatatttttagagagtcctctaagacatactctttataaagagactgagtcttttatttttcatctaacatcttacaacatgcacaatctttagggtttttgaagtatatgagatgactaagggactttatttcacaagactaagatcctagatcataaatgtactttagagacaatatgtatacaaaaccgtctagagacatctaaagaggctatatattaaatgggattgtacatgtttgtcggatactcaggaacgaggtacccaaggcaaggcccataattctctctttggcccatttactgaccaattcctcaccgagtaagtctgcatggtgggacgaacgaccaagtcctcgccaagcaagtctgcgagacggggcgaacgaccatgtccccgtcgagcaagtctgtgaggcaaggtgaacgaccaagtacccgccaagctgatccatatgaagaaaacacaggccnaagctggcaagccacgtccgaaccgtacatacaatatcaaaagggctctggctgacgcgatagaacacccccgcatgtgcccacagatatacccctcactgactcatgggccagtcaacccagtcatgagggcctcaacactggagtctctattgtgacccgcatacccgaaagaacgtaacaagtatgcatatcgggggttatgtccacacacgccaggggtgacataggcccatgacgataggtggaaccgcgccacgcacaaccgctccatgtgactcgccctagggacctcgcgcactactatggaggtgttaggaatggactagctataggaggtcgtgtgacaaacgagcaagacgatacaccataccaagagtacgactatgcatgaccctacggaggacccaccacgacaaacctgggggtccaacctctctctctagtagaaaacaaatctcctctgtaaggtcctacctctgagatataaaagggcagaccccctcctccttcacacacaagcacaactactataacgcgcctcgaagcaatactacgatcaacactacactggactagtatgagagcctgaataagtataactccagtatctcagctccttgctcgtatccccgtgatccaccattaagagtgagtccgcactagtatccccaaccgaacacaaatttattgtcttccggttttcaaaaccacgacaatgtccttagaggcctcttaaggacatttttattaagcattttatgagttttgttcttattaaatgatatgtcatataaggaagcatgatgtcatgatatgcaatataataaagagagagtttatgggagataagattgttttatcaagatgaaattttagagatgttaattttttgacaaatgttgacatgaaagtctagagacctctaatgcagtgggttaaatagatccttcatgaaaagatcatctttatactttttactagttagttgcccgtgctttgctacgttttttatatatcgtacaaataagtactgagatatttattcaaatataatcattgtttatttctaaacattaatatacacgtgtcttggtggttagcccaaatttatagaggaggaggacgtgatttcgagtgcttgctctgcactatttttaatatatttattgtttaattctaaatgataaggcgcgtgggcgcggatctagagtatgagcgtggagaatgaagctgtgctaggatgtccaccttgcattccctcatgcagttgaaacgggcaaccaataaaacaaattatgtttttaataaattagtatagatatagatttaaaccttttaaaatgagatattaaatggactctacgtgctcaaccgttcagtttcgatcgtcgccgcgcaccgtttccatacttccgtttccaccagctcatcacgagcaggcgggtccaacctcgcagtcgcagccccgagatttgactgctgtccttggctccgctgcgggcccactatcaccattgccccgctcctggagctcaccaaccccgcatccaatccacctctgcggcccactcgagcccgacgcgtccgctccctcccctagaccgcgctcaccgtactccggtccacggccacgtttgtcacattcgtgcgcatctgagagcggttcacagacccaagtccatactacgccaccgacgacctctccgcgcgccgacctctcggtaccgaggctttcggcgccgaatctcccgtcccccacctgcccgaacggtccctagccgtccgtatggccaggcgacggccggatgggcctccagcggggcacgtggcgggcgagcaggggcagccacccccggaccccactgcgacgcgagcggcctgcaccgcgcaccggcacggcacccggctgtttgaatcccgtgggccccactcgcagtaaattcacctgcataaatccttcagcagtccggccccatacgcttcttaacccatttgcatgacaagcggccctacggaactccatgacccacatgtnggtgggtgtttcaagacagcggaaccgacgaagcagaacgtggtgcccaaggaataagacagttaactccacgtctccacctcaccactgccagtaaacagcgagtcctcccttgctccgtcctcctcgtccctgccgttccccaaacccaaagcagagcagcctcggcttctcttatccggagaggagggcggccgccggcgtcgaccttcgcgaggaaggagaggaggccgttggatctcgctggattcgattgggctaggacgggatctccgcgggcaggtaaatactgctcattaattgatttccttactcgcgtcgatccggcctttgaatcgagagattgctcccggttctggctggattgaataaccgatttcatttcaaggaaaggtacttcgattcttggagctatttttcgctctcctttccattttcaccatttccttgtttgatgatttcttgatctcgttttggatttatcatgtatctccgcccgcctcttgctgaattgagtcctcgccgccgttgcagatgcgctgagctcttggcgtgtgcagtgcacgatggtcgatcttgctgatctcgagggtgcgggcgaggcggcgcgctcgcatcccgccgcttccggccagcgggacaggctggcggcgctgctggagctcgctgcggcggacgacgccgcggggttccgcgaggcgctcgcgggaggaggcggccagggcgacgcagcggagctggcggacggggtcgggctgtggtacggccgaagcaaggcgtacgagccgcgcacgccgctgatggttgcggcgacgtacggcagcgtcgaagtggtgtcgttgctgctcggcctcggatgcgtcgacgtcaaccggcgccccggcgtcgacggcgccaccccgctgcactgcgccgcttccggcggctcgcgaaacgccgtggccgtggtcaagctgctcctgggtgccggcgccgacccggtaactcccgactccgccggtcgcttgcctgccgacgtcatcttgtctccacctgcttcgcccgacgccttgggcgatctggagatgctccttggccgccgccgagggctcgctgtcgcgacctcggtgccatcgctctcgtcgtccccgccgctctcgtcctcgccggatgagagcaacaggtcgccgtcctcgcggtcgtcttcgttgtctccgattaccgtcgaccgtgccaagaaggagtacccggtggatccgacgctgcccgacatcaagagccgcgtgtatgcctccgacgagttccgcatgttcgcgttcaaggtgcggccatgctccagagcctactcgcatgactggacagagtgtccgttcgtgcaccctggcgagaacgcccgccgccgggatcctcgcaagcacccatacacggcggtgccctgccccaacttccgccgccctggtggctgccccagcggtgatagctgcgagttctcccatggtgttttcgagagctggctccacccgtcgcagtaccgcacaaggctctgcaaggagggcgcagcttgtgcccgccgcatctgcttcttcgcccacgatgaagatgagctccgccatgtgcctcacaatagtggtgcaggtctgctgtctccccgtgcctcttcatccattgacatgaccgctgctgctgctgctctagggcttctacctggatctcctaccaggcactttgtgccaccacctctgtcaccatctgctgccaacaatggtggaggtgctgctgctcattggctccaaggtagcaggctgcgctcttctttcaatgcaagagatgcacaggctgatgaccttggctcgctcctggaatgggaatctcaataccttggagcgctcagcctcccacaaagcagccgatcccagccccgtctttctactggtctgactattcgtccaacagcagttgctccatcctacctcgaagagatgtatgcttcagacatggctatgtcgccaaggttcaccaatgaccaaggtcactcagtcttctcaccagcacacaaatcagctcttctaaacaagtttcatcatcaacagaagggccttttgtcgcctgtcaataccaacaggatgtactcaccaaggggccttgatccatcaattatccattctccatttggtggcatgtctcctcggtcccctcggactatggagctaacatctcccctaagtgtccgtgttggtgttggagctgctgttactccgcgtgatatgttggatcagttttcttccctgaacaagcaccaggtgccatctgtgggatcgccacggaatcttaatgcctcatggggcaacattggtaccccaaagagtaaggtcgactggggtgtggacgacgacgaactagtgcgcttgaggcaccctgtgcaacatggaaatacagaagaggaaccagatgtgtcttgggtgcagtcactggtaaaccatgctgagctgaatggcaagaggggtgaaatggcaagcatggcttctccatcgattaacaagcctgacctgagcttttagggtgactcgctagatcagtgttattgcttcttggcttgagcagcaagatgcgcttggagccgaagtaactgtcaaagaggccttttgctctcaaggtggatgaaaccatatttttgccgcgttagtttccgagaagaatagttatttgtcctagtaaataataatattctttttttatttcttgaaattttttgttcgcaaagtcggagatggtgtggtcttcaggaaagcatttgctcacaaattggtagctgaaagaagctgtcgagtattggtaaacagcctcgttaccttggaggtcctaactagtattcttttgattagttcagatgaggtgaaaattcatatggtcgaccgtgagagtcgatagtaattgtgttgatctctgtaacaagagaggttatagatttttttacccccatttgtcaatgaacaatttcataaatacattgatatttccagttta

SEQ ID NO: 4968 - DNA, 2275 bp, Zea mays
acccccgaggctcgccgggcctcgtttaggcattcccctcccctcccctccccacctccccgtcgtcgtagtcccctgttcatccatcgcaagaactcctgggatcgcgctgggttcgccgcttgcatgcatgcacgcacaagcccgcgagcccggccggggtgccagcatattcgttcgctagctcgtgggctcttctccgtctccgatcccttccgtccgcgctgaagaacatgcgcgcgcgccgggctgtttagatccgatccgatccaggccttcttccgttgcaacctgtgccttgaggcctcctggtgatcgatcttctgcattaattgctggctcaatggtcgccacagccacaggcgtagagtgctgcaagatctttggttttgttgctctataaacactgcatgtgttcagtattgtgaggccattttaaggaatgcagaaagatgtgtttgagtgaaaaagatttctgctctgaagaggagcacatttctccaataaatttcgaatcgctaataattcttgatgagcgaggatttcaagcacacattagacgcatagtagaaaatagctgtgatgcaactgatgtcagaagaaatatcgcaatgctatgtcatataatttctgaagacggctgaagttctctctttaccaagttcctacaatcagttggtagcaggtgtctatatatatatgatggaagcagagaagaatggaaacattcttatgcaaaagtatgaggttggaaaattattggggcaaggaacatttgccaaggtataccatgctaggaacatagagacctctcaaagtgttgctatcaaggttattgacaaggacaaaatttttaaggttgggctaatggagcagatcaaacgagagatatcggtgatgaaactggtgaggcacccaaacatcgtgcaactttatgaggtcatggctactaaatcaaagatatactttgtgcttgaatatgtcaagggtggtgaattgtttaacaaaattgctaaaggaaagttaagagaagatgcttccaggaaatacttccagcaattggttagtgcggttgatttttgtcatagtaggggtgtgtatcatcgtgatttgaagccagaaaacctactcgttgatgagaatgggaatctaaaaatttcagattttggattgagtgctcttgctgaatcaagacgccaagatggtcttctacacacaacttgtggtactccagcatatgtggcgccagaggttattagccgaaaaggatatgatggcgcaaaggttgacacatggtcctgtggtgtgatcctatttgttcttatggctggatatcttcctttccaagattcaaatttgatggagatgtacagaaagattggaaaagcagatttcaaatgcccaccatggtttccatctgatgtacgcaagttagtgtcaagaattcttgatccaaatccaaggactagaatgccaattacaaaaatagtggaatgcttttggttcaaaaagggcattgacaacaagctaatccgaaagaatatcgagatgaaagggaaagtttcagctctcactgatgttaatgtagttttctcatccacgggtattggtagcaacaataacaaattggttgatgtggaacaagatgtagcaaagattaccaacctgaatgcttttgacattatttccctttcagaaggctttaatctttcaggcttatttgaagagtccgagaaaagaaaagaggcacgcttcacatctagtcaatcagcttcaactattatctcaaaactagaagatgctgccacctgttcaaagatgacaataaagaaaaaagaaggtggtgtgctaaaaatggaaggtgcaaatgaaggaaggaaaggtgtactatctattgatgctgagatctttgaagttactcctgctttccatcttgtagagattaagaaaaataatggggatacactagaatatgaaaatttgtttaagcaggacatgaaaccagcgcttaaagacattgtttgggcatggcaaggtgagagtaaggaccaacaggccaaggatcacaatcaatcataaattactcaaccagtttgtttccataataagaaataatgtttgttagtgttcaaaagttgtatctacttcaaactttctcgcatttgacataaacatgtgatttgattcagagtttgttaagaaccatagtattgttatgttacatctatcattaattgtttttctatattgataaaaaaaaaaaaaaaaaaaaaaa

SEQ ID NO: 4969 - DNA, 3886 bp, Zea mays
  misc_feature (465)..(465): n is a, c, g, or t
gtatggcaggggcctgccatcagagtacctggcttgcgaagtggccgtgaggagcagctcatcccacttggaagcctcgtgctcgagccactcggcgcgggcacacagcgcggcgacgtcggcctcgacatcgaagaggtgcgtgtggaggacgttggcctcatttgcggcagtgcccgcgcttcgtcctagcgtgacgtgattgatggtcgcgatgtcggtctcagcagcgtgtggaggaaaaagcgtagggaggcatcgaagaggtgcaatgtgatcggtggtcgcgatgttattggtgcgagcccacgtcgtcgccgtcttggtcggtgccgaggaagcgatggttgaatacgagggagggggtcgctgagataacgatgctcgtgggcgtgcaggaggagcgccattggtttctgtgtgccggttgcgatggtgatcaacagttggagatgatggggcaantctagttgaggtgagggagcgagatcctcggcccagttgcggcgtcagctctctgatggagtgcgggccagcacagatggagcgcatgccgagtacgtgggcggcccggcgagcgcaatgaagcatgtgcgaggatgaaagggagcagggaggaggttggaaggggcgggcgaggccaggaaagacagaggcgggacatgctgtaggggtggacgtccacatacgctcttatagtgtagtagagattgatggctatgactcctaaaaggcattgagtcgagcatcgtatataaagaagtaacaaaaaatgatatattctataaataagatagctataatattgacactttcataggtctatagaataataaccgaggttaccctttttagaaggactaataaatctataacttgtcatcgcttcctatatatattataaaaattactctatttaaattcccaggccgccgggggttttctccttctctccttggttgcggccggcccctagtggttagtgggagtgacgtccgaatcaactgtcaccgtgtggcccccgcgtgcgtgcttgcctccaccaccagcgcgacaggcgccaagcatccatgcttgtcctgtctatttctaccgtctcacctctcgtcccgtcttctccacgatgggccacgccacaccactgagcacccttcctccctgttcttgcctctgtcctatactactactactacccttctttagccgccgcgtgcatgctagaagagatatagccgccgatcgatcagcgctcgaccgacccgtcttccttgacgaacgaccagctaggaaacaggaggccccttctttgcacgtgtcagtgccagccagacgcacccaaggtgaggcctcgctgttcaggaccctttaatgcccccctcctttgtttggcgtgcctctgcttcgtcttcgtggtatataaatgctttcccctcttctgtgatcgcctttgtgcctgcgccattggggcctgtttggagaggggggttgccgtccaaatcgaaccaggctctgaacatccgtaaagcaacccccctctccattccaaacaggccctcctgcctccgttcctgggctagctgtcaggacggctcagctccagctttgcggccctccagctctccccagttcaagttcaatattggcgagcatgcgagtttgccctcttccgtcgtcgtcatcatcatcgtcctcgcgatcccggcgtccctgtttcggcctacgcctcccgtagacaacagttgcgccctgctctccggcaagctatggccaagctgagctgcttccccgctctgctccccggcaagaggaagaagaagacacgcaagatcaccgatgctatcaaggccagcggcaacgagtgccccaaggtgaagccggtcgaagtcgaactcatcgacccgacgcttggtgcaggcgtcgtccaggacgtcgtccccgccgagctctcggtccccgtggaggaccgcaacaataaggaagcggctgatcaactggtgttggtgaaggagagcgatctgtcagatttcgacttcagcttccacgcggccatgaagcccgtccggtccgacagtgacgtggcactggacacctcggccgacgctgcggtggcggacacatcgccgaagctgaagcggtcttgctccaacatcgagactaagcgaccaggctcgcgttccgcgcccgagatgccggcccggtcgcgctcctacggcgatctgggcaacctggtcgccggcctcgccctggacgcgacggcgaccccgcacggcgcgccggaggccagtccggcgtccgtgaagacgtcgcgcaccgccgaccgcgtgatgctgaagaagcggtcgtccagccaggtgctgccctcgcgcagccggaagctctggtggcggctcttcctctggagccaccgcaacctgcacatgccgcggtcggcgcgcacggcccaccgatcgttctcgcctggccgccacgacgggtacacctcggacacgttcgaggagggcccggccgccgaccgcaagaacaagacggtcatggtcgacgagtcgccgccagcagcgtctgtgcccaaccagtgggtcgccttctgcgccgagagctccatccacgaccgcgtcagcgcgtgggtcagcagcatcgaaagcgagcctccgttcgatatcgccgaggaggatgacgacaactacgacggagaggacgatgaggagaatggcgagtgtgcggcgtcgcagccgcgccatctcgagctcggggagccatcgtccgggaagggcggaaacagcaaatccaagcgctgcgcaacgacggccgacgaggtcgtccaggccaacaccgtggtgcagtccctgaacgccttctcgtcggtggcgcacatctcagggatgggcctcaaggtggtgccgatgatcgcgcccttctcaaccctccgggccgtcaacctctccagcaacctcatcgttcatatctcccctggatcgctgcccaagggcctccactctcttgatctgtccaggaacaagattgccagcgtcgagggcctccgggagctcacaaagctacgcgtgctcaacctcagctacaacaggatttcgcggattgggcatggtctgtcgaactgcacggccatccgggagctgtacctggcgggcaacaagatcagcgacgtggagggtctgcaccggctgctgaagctggcggtgctggacctgagcttcaacaagattacgacggccaaggcgctggggcagctggtggccaactaccactccctcctggcgctcaacctcgtaggcaacccggtgcaggccaacatcggcgacgacgccctgcgccgggcggtcacgggcctcctcccgagccttgcctacctcaacaagcagcccgtgaagccgcagcgcatcgcgcgggaggtggccacggacagcatcgcgcgcgccgcgctcagcggctcggacagccggagcatccggaagaggacgtcgcggcggctcacgcagagcccccgctcgtcgtcgttgaccagggcccgtggcggcggcggcggcggttcacccacaccaagaaacacctctcgtcgtcgttgaccagaagaaccaactgcgtgattcgcgttgctctttggagacgggagacggcggcgtgactgcgtgcaggcagactcagacgacaccatgattcggcacggcgccagcatgatatgagacaaaccaagtatataaagcaagtatgatgtgagagaattgcgatgcaacacataatgtacatacttgttagggagatattgcttagattaatactacgaccgatgcatctttgtacctgaaaatatcaatttgagcctggttgaagatgaacatccatccaacatcgcagtactgccgcttcatgg

SEQ ID NO: 4970 - DNA, 1446 bp, Zea mays
cctgtgtggacccccccggcccggaaaacacccacttcacctccgaccacttcacctccgatcccgccaccactacccaccctttcctttgacgtcccgatggcacctgtagatctaacccccaagcagcccaggaaggcctacggcggcgacggcggcgcctactacgagtggagccccgccgacctgcccatgctcggcgtcgcctccatcggcgcagccaagctctcgctcgccgccggcgggctcgcgctccccagctactccgactcagccaaggtcgcctacgtcctccaaggcacgggcacctgcggcatcgtcctcccagaggcgacgaaggagaaggtggtggccgtgaaggagggcgacgcgctggcgctgcccttcggcgtggtgacgtggtggcacaacggccccgccgcgccgaccccgctcacggtgctcttcctcggcgacacctccaagggccacaggccggggcagttcaccaacttccagctgacgggcgcgaccggcatcttcacgggcttctccaccgagttcgtgtcgcgcgcgtgggacctgccggaggcggacgcggcggcgctggtgtcgagccagccggccgtcgggcatcgtccgggcgtcctcgtccccgctgccggcgccgtcaccgcgggaccgcgagggggtggcgctcaactgcctggaggcgccgctggacgtggacatcccgggcgggggccgcgtcgtggtgctcaacacggccaacctgccgctggtcaaggaggtcgggctgggcgccgacctggtccgcatcgacgcccactccatgtgctccccgggcttctcgtgcgactcggcgtaccaggtcacctacatcgtccgcggcagcggccgcgtccaggtggtcgggcccgacggggtgcgcgtcctggagacgcgcgtcgagggcggcttcctcttcatcgtgccccgcttccacgtcgtctccaagatcgccgacgcgtccggcatggagtggttctccatcatcaccacccccaacccgatcttcagccacctggccgggaagacgtcggtgtggaaggccatctcggcggaggtgctgcaggcgtcgttcaacaccacgccggagatggagaagctgttccggtccaagaggctcgactcggagatcttcttcgctcccccatccaactgagaaaataggccggaagccccacggtggagtcctctcgttaggtcgtcgtgcttagattaggttagctagcttgcctttaataaaaagagagtggtggtcgtcggcgtcggcttcggcggtctgcttcttcttcattcagtgcgtcggtcggtttagagtctgtcacgtgtcccgtcattgaactgcagtttttgttaataaagtattgttattattaggtattaaaaaaaaaaaaaaagggcggcccgctcgcgatctagaac

SEQ ID NO: 4971 - DNA, 2483 bp, Zea mays
ttgacaagaatgtgagtgcttcttgcttatgtgtggccatatattatcagaaatgtgttaaaaggattgaggacgatgagactgggcacaagcactgtaccggtcagtactttgattactggaaatgtgttgacaagaatgttgcagagaaactctttgagatgttaaaatgacaaattttccctccatttatccacctaaagttggtaataattgtatcacttgtgaggcctatagactattaaggcacttaatatttgtcagagaacttttgcctcttgggtaacacaaattttccactgccagtttgcatttcatttctgctactagtattgaaccagcaaggtttcctccattgctggataaaaatcaatggaatattcccaagattgtggctgagcattaaatgctataatgtaccttaattgcttttatggtgtattttgacgaggacatagctaatcattcaggtccataacttggatgagatggaataacatgtgtacattacttctagctggtggtaatgatttgtcatgagaagtttgtagtatcatcggaatgaaacattggcacaatatagttttttttccagatgtagtgagttgacacatggatgctgttatgaggagagcttgtggttatatattccagcatctcttgcattcgagcggcctgtgtggttccccggccttgtatgtttactgttcattgcatatggggctatctggtgcattatggcggggtaaaatctgatggaacatttttatctttgccatccagtggtttggttatgttcactgtcgctttgtgtttgtctcatgttctgtttgccatgcttggtgttgtgctatggcgacaactgacaagagctcacttcttgctatgttgtatcatcagacgtggaatgctcaaccagttatctgctgtgcgtgccacgaatttgttgcatcggtgcattctgactggattaaatagactggatgttctcctttgctttggatgatggtgatcaatgtgtcctgacctggcctagcgaaaatctacctgaaaggtttttcagattcgtgcagtgcttgcaccgtaacaatgccatcatgtagtcgatacatgtgtactagaatattcccaaaggtgtttctaagtttggtctaaggtctatttgagatttttgtgtcaaggctatgattatcaggactcgtcacgactcatgactcccacccacctctcacccagtcgcacttgtcattgtcaggactcccacccagccatccctggcctgctctcctaccgtacctctcgcgtggcatgcggtgtgactcccggcggcctgtgactctcggcctccggcgaaccttcggttcctgatggctggctcaaggtgagctcctgggttccagatccagacaccgacgtgacccggttaaaatcatgtttgaagattcatgttacttgcatgatacactaaacaagagtctagatgcttacatgatacactacctggactcagttcgttactaatgtttgcctatgggacatttcgcccttagccattgccttgtgcccacaccacaacagatacaacaccacttgacatcgatcaacaaggttcttgggaccaggcatagctcttcaacaactccacataaatgtcattgacaccacctctgtcctcgaccaagtggtatgttgactctagtgtcggctcccacatgaccaacattgtcgatatcgtttcttcctcacgccctcctccgtctagtccttcatctgccattgtcaataatagggtcttgtaacgtgtcacctctattgggtaatattccttgttcatgccacaatgatctcttttttctttctaatgtattaatttcacccagcattattaagaacttgatttatgttcattgctttacaactaataacaattgttccattgagtctgatccctttggtctttctatgaaggacttacaaacttggagcatgattgccaggcgcaatagcacatgtggtctctacccattcttcccaccggttagcatcactgcactttccaccatcgtgtcctcctcctccctctagcatcgttgccttggtacatcttggtcatgatgccctatgcaagctcattaggtccaatgctattttttttgtaataagcgcacagatgatcttatatgtcatgcttgtcaattaggtcatcacacatgtattccttttagcatgtaaaattctcgtgtgctacaccattttgatttaatatattgtgatctttgaacatttccgattgttagtgtatcatgttacaaatgttacctcgtcattcttgatgattgcactcactacacttggatttttttctcttcacctcaaacctgacatttttggtattctctccaatttttctcctatgtgcataccaagttcatctcacccttcaaggtggtccagtgcgacaatgtgcacacctaggttatctc

SEQ ID NO: 4972 - DNA, 1579 bp, Zea mays
ggaatgatgctattgtttctagagacgctgtgatatctggaccaaatttcttgggaaggtcaagtggatcttcaaggaggcctgttatctcgagtagccgcgatgcggtggtcaccgatagttccgagccttcacgagcgcgcacaactgatgcaagccctggggtgttccgcagagcctcaggtcctcagagaagctcacctgtccactctgcagaacagaagcgctcatcctcaggccgtcatccatctaatgcgaagaactacgattccgctctcaaaggcattgaaggccttactttagatggcgacgagagggttcagtactagagcggcaagaagaaattctacatcccctgtaaaaaagcataaccaggtggtaagcattgtgtttcctgttgagttttggatcaacaggaaacagaatgatggaaggaggatctggtcacgtgttgtgcggtttcgggtggccttctgagcaaggtaaataaacggtcctgtccgaggcgcttcaaacctagctctcgtaatgttatcgtcatgtatgtaaatgtgtcttatagtgagcctattttgttgttccaatccttacggtgttccattctgaggtgctgaacctcggggcaacaagaccgaagctggtagggacttcaattggagaactggggttcaagcatgtagaattttaaaatcggttcatttgtctggacaatgttcctgactagtaatgtgatcgcaagacaaacgatgttatttctctctctggttatcaatatgtccatctcttcacacgcctgatagaatattatttgacaaaatgatgttataaatctgtgtaattttctcaaatctcggttaaattttcagatgctttgatttttttttaaaaaaataggataacatatagtttggaatggagggaatagaagattcggcttccagccatctcgccgtctgatactgctaccctactcgcacatgtttggggttccaatcagtactcatcaatctgctaggggttttagggctagtttgccaactccattttccctatacgtctcatgtttcgtattcttgcagttaaaaaagaaaaactgggacgataggctctatatccttgtattgcaatccgtaagttcacctgaatcgcaagctacaaggtggttacaagttcagggatggcatcagcccgaaaagggtgatcatggcagggatgagaacaaacatgtgattgacccagttcccaagataaacccaatctagctagcttgtgcatagacgagttatttatacgagtaaaatcgtcgaacaaacaaaatgctcatacaagagattacaaatatcgctaaacatcatcccacacaggcctctatccatcgccatagtccccatagagtcaagtgctttgagaaaacaataagctcccaccaagactctgtactccatccattccaaattagtactcgttttagctcttagttttcatgtctatatatttaaatgattgatggtgaatttagacacatatatacaaaatacatgcatcaattattgtatgaatctattaataatctaaaacg

SEQ ID NO: 4973 - DNA, 3834 bp, Zea mays
gacttgggaacaaaggtaaaaattgaaggtgacatcaatagaggtgtggcatattacaagatagctctatactacaattggcactatgctgatgccatgtataatcttggcgttgcatatggtgaaatgttgaattttgagatggcaattgtcttttacgagcttgcgctgcacttcaatcctcgctgtgcggaagcatgcaacaatttaggagtcatatacaaagacagggataaccttgacaaagctgttgaatgttatcaaatggcactgtcaattaagccacttttcgctcagtcgctaaataaccttggagttgtctatactgttcaaggtaagatggattctgctgctagcatgattgagaaggccatacatgcaacccccacgccggccggggcatataataatctaggtgttctttacagagatgctggtagtattactttagcaattcatgcttacgagagatgccttcagatcgatcctgattcacgaaatgctggccagaaccgtttgcttgcaatgaactatattgacgagggctcagatgacaagctttatgaagctcacagggagtggggaaaacgctttatgaaattgtatccacaatatacaagttgggataactcaaaagttgctgaccgcccattgatcatcggttacttgtctcctgattactttactcattccgtgtcctacttcattgaagctccccttacacaccatgattccacagtttgcaaggtggttgtctactccggtgttgtgaaggcagatgccaagacacttagattcaaggataaggtgttgaaaaagggtgggttgtggagagatatatatggtattgatgaaaagagggttgctagcttggtaagggaggataaagtggacatacttgtggaacttactggtcacacagcaaataataagttagggacaatggcatgccgacctgctcctattcaggttacctggattggctaccccaacacaacaggtttgccaacaatagactaccgaatctcagactcattgactgatccacctatgacaaaacaaaagcatgttgaggagttggtgcgccttcctgaaagctttctttgttatactccttccccagaagctggtcctgtttgtccaacgccagcaatttcaaatggtttcgtcacttttgggagctttaacaatctagcaaagattacaccgaaagtgttgcaagtttgggccagaatattatgttcagtccctaactccaggcttgtggttaagtgcaagccattctgctgtgagaacataaggcagaaatttttggccacactggaggagttgggtttggagtcattacgggttgatctgttgccactcatccatctgaatcatgatcacatgcaggcgtattctttgatggacatcagcctggatacatttccctatgctggtactacgactacatgtgaatctttatacatgggggttccatgtgttacaatggctggtgctgttcatgctcataacgttggtgtcagcttgctcagcaaagtcgggttggggaggctggttgccaaaactgaggatgagtatgtgagcatagcgttggatttggcatcagatgtgaatgccttgcaagaactgaggatgaccctgagggagctgatgatgaagtcgcccgtctgcgagggagagagattcacccggggcctggaagctgcatacatggacatgtggcgcaggtattgtgacggagacgtaccatctctcaggcgcttagcactgttagaggaacatcctgttgccaatgagccagactcggacaaaacctccgagaagcttgcagatctgaaagcgcagagagcaagcgcgactgtggaggaagataaccagcccccagcaatggcgaatggtgtgagatcgcccagttcacccgctgctgcaaaatgtgaatcaaatggtcacagcagccaatgaccaagaacggtgtcacgctccattgatgcagaccgatactgatatattgtaggtcgagtgatgttagcaacatctgtgtttagagggaggggttgttaagctccgggtgtctgatttattgacacttgcggtctgtaaggtgattaaatgtgtcttataaagttcgatttgtagggctttgcccctgtaggttcttgatatggtaacttaagttgcttcattagaaggcgcgggttcccggttgtatatgtagtagaaatatgacagtaaaacaacttgaagagtcgattaaccgacatagatgtcattatgctattttacttccttgtgcgtatcagtctcgtgattactgaccaacatgccggagcagcagccgcttctagctcaacgttgagggccagtaatttatctgtctttgggttaaaaaaaaacccgtgggccatgagcccattaccttatcgccagttgagacatggagctcaccgcatgatcggcccatatttaaacttcattctacgaatattacagtctataatataaaacagttttttgaatgaccatataatgaactgctggacacagtcttaaggttcaaaggttaagggatctatccattgacgattggagggtttaggggttaatgttgggatctgacaacaatgacccaaacaacgagatgacaaacgtgtaatagcacgctagatatggaacaatgattctcaaatgtcttattagccatcctctcacactgtctagacataggtatttatggggtaaccaagggtagccctctaaagtacagccttatccttggttacctgtcacatcttaggatgtggcaccctctaaaatacagacttgtccttggttaccagtcacatcttaagaatatcctttatagcggtgtattttaagaaccattacataccttatattacacccaattacatacccgcaccaacattaatgcacacccatttgtgactagctagaccttccttcagctacaggggcccatgctcctgttgtggcctcgatgttattcattggccccctaagtggggaagccttcaaaaccttcgtcaatgattttatgcgttgtccaagtgacaaggccaaagtctccatcgccttttaagtcactcttggatcggtgaggccttcggtagcatgcccacggcttcgatcgagccacgaatgtttgatgtagatagcagagtccacatgttaagatcttcccagcgaagtccttgccatggccttcggagtcttcgatgggccaagcagccatagactcgatcgaccgtatgacgagtctgcctcacatggggaaatcttcatggtagccctcatagccttcaatgaatccacatttattggagagaagtatgatgactgattagacagtatcgaccagacaaatgatcgggttcccgttcaactttctccccaaaagtagcccctaagggcgaggctcaacctaatgagtcgatcccgaagactagataatgattcgaacgctaccctcgatcatccgatttaggggcatttttatgacatttgttaattaattgattattattttcatcatttctggcttatataaggcaacacccggttagggttagtgttacacgatacgtttgcatcgcttcctcttcctcatatccacaagcgccgctgaactccgtcatgaggccttgcccgcactggtgtgtgagtgaagcataccgcacgacctcgtcaccagtacatgatgtcgtccacttcttcatcaagttctaccagcgactcaccacagtgcgttactaatgcgatgacgaagccaccgccacagacgtacactgtttcagcagacggttcaaa

SEQ ID NO: 4974 - DNA, 1588 bp, Zea mays
ggcgggggccagggtggtcgtcaccgaggcctgcgccgtcgacaaggtgcgcgggttcgccgccgagcgcggcgtgccggtggtcgccgtcgacggcgccttcgacgggtgcctggagctgcgggccctggtggacgccgccgagccgctcgccgccgacgaggaggtcggccccgacgacgtcgtcgcgctgccctactcctccggcaccaccgggatgcccaagggcgtcatgctcacgcatcgcagcctcgtcaccagcgtcgcgcagcaggtggacggcgagaacccgaacctgtacttcagcaaggatgacgtggtgctgtgcgtgctgccgctgttccacatctactcgctgaactcggtgctcctggcggggctgcgcgccggctgcgccatcgtgatcatgcgcaagttcgagatcggcgcgctggtggagctggtgcgcgcgcacggcgtgaccgtggcgcccttcgtgccgcccatcgtggtggagatcgccaagagcccccgcgtgggcgccgccgacctcgcctccatccgcatggtcatgtccggcgccgcgcccatggggaaggacctccaggacgcgttcatggccaagatccccaacgccgtgctcggccaggggtacgggatgaccgaggcggggcccgtgctggccatgtgcctggccttcgccaaggagccgttcgaggtcaagtccggctcctgtggcaccgtcgtcaggaacgcggagctgaagatcgtcgacccagacaccagcgcgtcgctgggacggaaccagccaggcgagatatgcatccgcggcgaacaaatcatgaaaggttatctgaatgatccagaggcgacaaagaacaccattgataaggacggatggctgcacaccggggacattggttatgtggacgatgacgacgagatcttcatcgttgacaggctgaaggagataatcaaatacaagggcttccaagtacctcctgcggagcttgaagcccttctcatcacacatcctgaaatcaaggatgccgctgttgtctcgatgaaagatgaagtcgccggcgaagtcccggtggcattcattatacgcagtgaaggctctgagatcagtgagaacgagatcaagcagtttgttgcaaaggaggtcgtgttctacaagaggatcaacagagttttcttcacggattctatcccgaagaatccctccggcaagattcttaggaaggacctgagagcgcggcttgccgcgggcatcccaagcagtgacaacacacagtccaaaagttgatacgtactttcgtactattcttttctagctgtgccaaaaatcatgctgtgctctattcatgagatggcaatggtatacacaaaacgccaagcggtcgttatcgattcttctagatgggcaagggtaaggtatacttcgtttgtgtccgacatattatgtatttgtatcatgtatagatacgttttgttgacaacaagtgctaattataatgtataccatgtttgggaaaaaaaaaaaaagttacaaagagtcgacccctgtcctgaaaaaaaaaaaaaaaaaaaactcgagacctcgtgc

SEQ ID NO: 4975 - DNA, 4584 bp, Zea mays
  misc_feature (4396)..(4396): n is a, c, g, or t
acggaaagcaccaagatgatcatgcgatatcttgcttacatgggtgggaaggctgcttccgaagggcgaactgtggagaagcaagtccttcagtccaatcctgttcttgaagcatttggaaatgcaaagactgtcaggaacaataactcaagtcgtttcggtaaatttgttgagatccagtttgatcagaaagggaaaatatcaggagctgctgtaagaacttatcttcttgagagatcccgtgtctgtcaaatatctgacccagaaagaaattaccattgtttctacatgatatgtgctgcccctcctgaggagcgtgagagatacaaactcggagatcccagcacatttcactaccttaatcagtccaactgcattaagcttgaaggcctcgatgaatctaaagagtaccttgaaaccaggaaggctatggacattatcggaattagttctgaagagcaggaagcaatctttcgggttgttgcggctattctccacttggggaatgtcgagtttgcagaaggggatgatggtgattcatcaaaacccaaagatgaaaaatctctttctcatttgagaacagctgctgagctcttgatgtgtgatgagaaagctttaaaagattcattgtgtcagcgcattattgtgactcgcgatgagaatatagtgaaaactttggatcctgaagctgctaagggaagtagagatgcacttgccaagactgtgtactcacggttgtttgattggcttgtgaataaaatcaacaactctattggccaagaccccaactcgaaatgcttaattggagtgctggatatatatgggtttgaaagcttcaagacaaacagttttgagcagttttgtatcaacctgacaaacgaaaagctccagcaacacttcaatcagcatgtgtttaagatggaacaagaagagtacaccaaagaagaaattaattggagttacattgagttcattgataaccaggatgttcttgatctcattgagaagaaacctggtggaattattgcccttctggatgaagcttgtatgttgccgagatcgacacatgaaacatttgctcagaaattgtatcaaacttacaaaaatcacaagcgctttgctaagccaaaattatctcggtcagacttcaccatatgccattacgctggagatgtcacctatcaaacggaattatttctggacaagaacaaagattatgttgttgctgagcatcaggctttgttgagtgcttcaaaatgtgcatttgtttcaggccttttcccttttctatctgaggattcctcaaaatcttcaaagttttcatccattggttctaggttcaagcaacaattccaatctctgttggaaactctgagtgcaactgagccacactacatccgctgtgtaaaacccaataatttgttgaagcctgcaatttttgagaaccagaacgttcttcagcaactcagatgtggaggagttatggaggcgattaggatcagttgtgctggatatccgaccagaagaacattctatgaatttatagaccgttttggtattcttgcgcctgatgttttgagtggaagttctgatgaggtcagtgctgtaaggaggttgttggacaagatagatcttcaaggttaccagattggcaagacaaaagtattccttcgtgctggtcagatggctgaacttgatgctcgtagaaatgaagtgctagggcgttcagctagcatgattcagaggaaagtgcgttcattcttggcacagaagaatttcattgcattgcgaagatcagctttacaaatccagacagtttgtcgcggtgaacttgcaagaagagtttatcacaacctccagagagaagctgcttcactcaagatccagactttgtaccgtatgtatactgccagaaaagcgtacaacgaactttctgcttcagcagttaccattcaatcaggattgcgcggcatgtgcgcgcgtaaagagctccacttcagaagacaaacaagagctgcaatcatcatccagagtcgctgccgtcaattcttggcgagattgcattattcaagaacaaagaaagctgcaattactacacagtgtgcgtggagagggaaggctgctagaaaggagctccgcaagctcaaaatggctgcccgggaaactggtgcattgcaagctgccaaaaataaacttgagaaacaagttgaggagctcacgtggcggctacagttggagaagcgcatgcgagctgatctcgaggaaactaaatcacaagaaaatgcaaagttgcaagctgcattgcaggaggtgcaacaacagtacaaagaaacaaaagaaatactagtacaggagagggaagcagccaaaaaggctgcagagatagctccagttattaaagaggtccctgttatagatacagagctaatgaataagcttagagatgaaaatgacaaactgaagactatggtcagttcgcttgaaaagaagatcgatgatactgaaaagaaatatcaagaaacaagcaaaatcagtgaggataggctcaaacaggcaatggatgctgagactaaaatcgttgacttgaacatggcaatgctaaggcttcaagagaaaatatccaccatggaatctgaggagaaagtgcaaagacaagcgcttctaagcacgccagtcaagagcatgtctgaacatttgtcaattccaattgctccaaaggcacatcatttggagaacggctttcatgaggttgaaggacttaaggaaccccaaagtgcacctcctgctattaaggaatatgggaacggtgatcctaagatgaaaaaatctattgttgacagacaacttgaaaacgtggatgcactcattgagtgtgtagggacaaaccttggatactgtgcagggaagccagttgctgctattaccatatacaaatgtcttcttcattggaaatcattcgaggcagataagactagtgtttttgaccgtctcattcagttaataggatctgctatcgagaacgaggatgacaatgacaaccttgcttactggctctccaatacatctagcttattgttcctactgcagagaagtctcaaggctgctggtgctcctggtagcgtttcacgaaagaaacctcctcaaccaacatcattatttggaagaatggcccaaggcttgcgttctgcatcttttgccaacatgcatgttgaagcgacagatgttgtgcgccaagttgaggccaaatatcctgccttgcttttcaagcagcagctaactgcttatgtggagaagatatatggaatcgtccgagacaatattaaaaaggaattatcatctttgatttcgctatgtatccaggctccaagaacaatgaaagctagcatgctgcgagtttctggacgattatccagtcaatctcagagtcagagcaaccactggcagaaaatcattgagagcttggataagctcttgaagatactgcaagataaccatgtgcctccggttttagctcagaaaatatttacccagatattttcatacattaatgtccagctattcaacagtctattgcttcgtcgtgagtgttgctccttcagcaacggagagtatgttaaggctggtctagctgagttggagctgtggtgtgcaaaggcaacaactgagtatgcagcatcttcatgggatgagctcaagcatatcaggcaggctgttggatttttggttatattccagaagttcagaatatcttatgatgagatagtcaatgacctatgtccgatcttgagtgttcaacaactgtacagaatatgtacacaatactgggatgacaagtataatacccaaagtgtttcatcagacgttcttagtaacatgcgggtgctaatgacagaggattctaacagtgatgaaagcggttcgttcttgttagatgataattcgagcatcccgttctccgtggatgatatcttgtcagatcatttattgatttgttgtatattttttggatcctttctaccacatgtgcctttttttagttatcttatccttttgagctagcttttgtaaaaattcatataggtatttgttagggttgggatgggattccgcccttacagttagaaaaggccttatcttttaaagcggggcaaatgattctttgtagggcaacatgaaatcaatctttttacccaagggtgtggtgagaaggggtagatgcaatgtttgtagcctccccagttatagattgtgtaaattatatactgtaaatcaacagtgcaatggaaaagaaaggaaagctatatagcaagtgcagttatgttgtcaaaaaaaaaaaaaaaaaaaaaaaaaaaaaaaaaaaaaaaaaaaaggacaatataaaaaaaaaaaaaataanagaacgcgtacatgaaaaaaaaaaaaataatattttgggggggcctccataaaattcactgttcgtggcttttcaacgcagggccttggggaaccctttggttccccaacttaatataaatggcccgcgttcccccttttttagccgtggggaaaacccgagggttccccatctgattgcccttccca

SEQ ID NO: 4976 - DNA, 3367 bp, Zea mays
  misc_feature (3361)..(3361): n is a, c, g, or t
aattcggcacgaggttcggacttcctgcgctccgccaattgcttcctactccacctcctcttctccctccccaagccgccgccgccgccgccgcctcatctcatccccatcacccactcccggcggatcgtcgatggcggcgccggcgatatggcagccacaggagcaggggctccacgagatctgcaccctcctggaggcgcacatctcccccaactccgaccaggcccgcatctggcagcagctccagcactacagccagttccccgacttcaataattacctaaccttcatcctggcccgcggagaggggaaatcaattgaagttagacaggcagctggtctactactgaaaaacaatctgcgaacgactttcatctctatgcaaccttcgtcccagcattatgttaagtctgagctgttaccatgtataggggcaaccaatagggctattagatccacagttggaacagtgatcagtgtacttttccaaattgtacgagtcgctggatggattgagttgtttcaggcactccataagtgtttggagagtaatgacctggatcacatggaaggtgctatggatgcgatatacaagatctgtgaggatgtccctgaagagctcgatgttgatgttcctggtttgtctgaacgaccgatcaatgtgtttatgccaaaaatactgcagttcttccagtcaccacatgcaagtttgagaaaactatcgttgggttgtataaatcagtacatagtagtgatgccatcggcactctacatgtctatggatcagtatattcagggattattcaaccttgcaaaggacccttcagcagatgttcggaaactggtttgttcagcctgggttcagctcattgaagttcgcccatctattttggagtcacatcttaaaaatgttactgaattgattctgcaagctaataaagatccagatgatgaagtcgctctggaagcttgcgagttctggtctgcatactgtgatgtgagcatgcctcctgaaggtttacgggagttcttgccacgcttaatcccgactttgttgtcgaacatggtatatgctgatgatgatgagtcccttgatgatgctgaggaagatgaatcctttccggacagggaccaggatttgaagccccgctttcatgcctctcgattgcatggatcacaaactggagatgatgatgatgatgatgatgctgtaaatgtctggaacctgcggaagtgtagtgctgctgggttggatgttctctctaatgtgtttggtgacagcatccttccaactttaatgccattgattgagcaaaacttggctcgaacagatgacaattcttggaaggagagggaaactgctgttttgtgtctaggcgctatagcagaggggtgcattggtggtctatacccacaccttcctcagattgttgccttcctaatcccacttcttgatgataaatttcctcttatacggagtattacgtgttggacgctctctcgatatagcaaattcattgttcagagccttgatcatccaaatggacgtgaacaatttgataagattctcatgggattgctaagaaggatattggatactaacaaaagagtgcaagaggctgcttgttcagcgtttgcaactcttgaagaggaagcttctgaagaattagtaccccacttggaagtaattttgcagcacctcatgtgtgcctatggaaaataccagagacgaaatcttcggatactctatgatgcccttggtaccctggctgatgctgttggagcagaattaaatcaggcaaaatatctagatatatttatgccgcctttgatcacgaagtggcagcaactttccaattctgacaaagatctatttccactccttgaatgctttacatctattgcacaggcattgggaccaggatttgctcagtttgcggaaccagtgtttcaaaggtgcatcaatcttatccaatcgcaacagttggcaaagattgatcctactgcagctggtgcggtgtatgatagagaattcattgtttgttcgttggacctactgtctggacttgcagaaggtcttggcgctggtattgaaagtcttgttgcacagagcagtttgagagatctgcttttgcaatgctgcatggatgaagcagctgatgttcgacaaagtgcccttgcccttcttggagacctttctagggtttgcccaatacatttgcatccacgtcttcaagaatttcttactgttgcagcaaagcaactgaaccctcagtctgtgaaggatgcggtatcagtagctaacaatgcctgttgggctattggagaattagcaatcaagattggcaaagaaatagcacctgtggtgatcaccgttgtttcgtgcttgattaccatcctaaaatccccagagggtttgaacaagtcacttgttgaaaatagtgcgatcactcttgggaggcttagctgggtctgtccagacatcgtggcccctcatatggagcatttcatgcaagcatggtgcagtgccttgtgcacgatcagagatgattttgagaaagaggacgcgtttcatggactgtgtgcaatggtggcagcaaaccctacaggagccgctggttcattagcttacatctgccaggcctgtgcaagttggactgagataaaaagcgaaggtcttcacaatgaggtgtgccagattctgaatggctacaagcagctgcttggaaacaacggtgggtgggaacaatgcatggccgccctgaaaccagatgttgtgcagaaattagctagatacggagtatgatgagaagcaagctcgtgtggtttattcacctcatacaccgaccatcatctttatggcggagacaagagaggagcagaaaggggtgggggtcgtcgagagtgtctctgctgctgatgcatcatctttacatgtgtggcacttgagagtcgattcggttcgttggtacgccattgtccgttcgttcattgttatactggttggtgcacagcatttccagagcgagagtaggatgtcttggtaaaccccccatgtgtattggttggttgggccagtggacttggttttggtttttttgtcattcctactggcaaacacaacaaggccaccaccctcttgctcgccccaccccggcaacattgagaaaacagaggttttgtagcgtgtaattctctctcttttcttggtttcttattattattaggtgtaggattgttttcgagtcttgtttggcaggaagggtttgtacgagaaatcaattgattgctcactcaccacaaaataataaaaaagatcgatcgatggggcttgtatctcctacggctaaaaaaaaanaaaatt

SEQ ID NO: 4977 - DNA, 1987 bp, Zea mays
ctcgagtttttttttccctttttttttttttttttttttttttgaagagaatccattctggccgtttactggttcgaaggtgaagccatactttatagttccacgccatttacatctcatttccacttcttttatttaatgctccgcggcttattcgatttattctaaaactgctctcccacagccatcatgaccgatcttgcagctaaacgcaactcacgcccttctaagcacgcctggtttctccgttcatcatctgccgagtgtttcgagctagaggccgacttcaggactcaacccaagttgcccatgcagatgtacttgagctccaagtactcgtcaatgccgtacttcgatccttctctccctagaccagactgctttactccgccaaatggcgccacctccgttgaaataatcccctcgtttaccccaactaagccgtactcaagagattcagatacacgccatgaacgaggtatgctcttggtaaaaatgtatgcagctaagcctgcgtttgtatcgttggccatatggactgcttcttcctcagttttgaacggtataaggggtgcaactggaccaaaaacttcttctctgaaaagaagcatatcgttgctgacattccctactacagttggctcataaaatgacattcccaggctgtgtcttttaccacctagcatgacatttgctccctttgaagttgcgtcatttatgaacttctccaccttttgaacagcagcttcgttaatcagaggaccctgagatgtactctcttctagaccgttaccgaccttcaaactctgaacagcctggatgaatgcttttgcaaacttttcgtagataccttcttgcaccaatatcctgtttgcacaaacacatgtctgtccactgttacggaacttggcagcaagactgcctttaacagcaacatcaatgtccgcatcatcgaaaacaatgcaaggtgcattcccaccaagttccaaggagacctttttcacagtatttgcagatccagccatcagttttttgccaacagctgttgatccagtgaatgtaatctttctgacctgtgtactctgcagcaacgcatcacctatctcagcagcattacccatcacaacattcaatgcacccgctggtattcccgcttgaagagcaagatctgctgcagctaatgctgtcagaggtgtgaactccgatggcttgacaacaacagtacagccacaggccaaagctggtccaaccttccgggttatcattgctaatggaaaattccatggtgtaatagctccaactaccccaacaggctgcttcaaaaccaacaatctgcgatcagataaagttgggggaatgatgtcaccatatatacgctttgcttcctctgcaaaatattctatgaaacttgcaccataattgacctcaccaagggcttctttcataggtttcccctgctccagtgtcatgagaagtgcaagctcttccttgtgtgaaataattagatcgtaccattttcttagtgccttgctcctctcacttgcagtgaatttactccaagaatagaatgtactgtgagcagaagcaatagcatcagatgtttctctgctgcccatacaggacacgtttgccaggacctcaccagttgctggattttgcacctcaatggtctttccgtcgtaggcgtccacccactgcccagcgataagcccctgcgtcctgagcagcccggcggcgcggatcttctccatcgcggcgcccgcgtccgcgctcatgtggcggagggagacgactcggaacgaagaggctgcggcggcggggatgtggcgagcgccgagcgccaccgcgcgtcgcatagccatcatcgccatcgccatttagaacctggtatcgactatcgagacgggggggaggccggatgggggtgcgattgggatctaggaagtacgcgactcgtgccggcggcggacgccggagggaagggccc

SEQ ID NO: 4978 - DNA, 1824 bp, Zea mays
tgtcgccggccgacgcgtcagccacccaccctcgcgatcagacggccatggccataacgagctccaagatctgacggcgcagatccgtttctaaacccgtatatattcggccgggtacctcgggcccggccgctctcttttccgccctccacccctcgcgagctctccacccctccacacgaccctcctcggcggcggcggcggcgatgcagatggcggcgaccaccaccgagtcccaggcggccgtgccgcctcaacaccctcacgcccacccccacgcgcccccgcagcatgctcacccgcaccaccacatgccgcagccacggtgggtcgtcatcccgtacccgccgccgccgcccatggtggccgcgccaccaccgccgccgcagtttgccaagcacttcgctgctgggccgcccccgccgccccaagctggtgctgggcgccgcacgccgaccccgccctcgtctggatccggcgggaacgggtgcgaagaaaataaaaccatttgggtcggtgacctccagtactggatggatgaaaactacctacataactgcttcgggcccagcggcgaggtggttacaataaaagttatccgcaataggcaaacaggacagtcagaggggtatggatttgttgagttcttttctcatgcatcagcagagaaagctcttcagaattttactggtcatgtgatgccaaacactgaccggccatttaaattgaactgggcatcgtatagcatgggtgaaaagcgatctgaagtggcttctgatcactcgatatttgttggcgatctagctgctgatgtcactgatgaaatgctgctggagcttttctccagcaagtaccgctcggtgaaaggagctaaagttattattgatgcaaacacaggccgttccaggggctatggatttgtcaggtttggagacgacaacgacaaatctcatgccatgtctgaaatgaatggtgtatattgctctacgaggccaattcgtataggacctgcgactcccagaagatcttcaggtgattctggctcctcgactcctggtcattcagatggtgattcttctaacagaacggtatatgttggtgggcttgaccccaatgtcagtgaagatgaactgagaaaagcctttgccaaatatgatcttgcctctgtgaaaattcctctaggaaagcaatgtggctttgttcaatttgttagcagaactgatgctgaagaagcactacaaggattaaatggatcactcattggaaagcaggcagttcgcctttcatgggtccgcagcccatcgcataagcagtctaggggtgactccgtcaacaggaggaacaacatgtactatggcacaccattctacggcggatatggctatgcctccccggtgccacacccaaacatgtacgctgcagcgtatggcacgtacccgctatatggcaaccagcagctagtgagctagagagctcccctccgacgtgtcccctctgacgggaaacaaaggttttggtccggtgagcatagtagcgtcaggtgagaaggtgcctttataaggctgtcctaagaagtgggcgagatatgttgttgcatcgttatcgttatggtgcctgtaactgttgtgtgtgccgtgtgcgtccggaagaattggatggaatggaactcgtggcttgttgtagtacatcaaagagtcatgttattctttcaagaaattttgacttggtaataaattaaactattgtttgtgcgtccaaaaaaaaaaaaaaaaaaaaaaaaaaaaaaaaaaaaaaaaaaaaaaccccaaaaaactcgagaggggg

SEQ ID NO: 4979 - DNA, 2421 bp, Zea mays
cagtccttcagatctcccctcccttcctgtccttctctattatagcaagcaaagcgccactcgcaatcgcaacccaccaccctcaggtcaggcctcgctcagatctctccgccctcgtcccccctcacaccccaaaccctcggcccgcctctctcgtcaacgccgcccgacgagagcgatggcggcctcgccggccgcggccgcggcactcctcatcctcttcgccctcggggcggccggcggagtggcggccgacggctccgaccaccggtacaagatgtacgagcccgtcccgctctacgccaacaaggtcggccccttccacaatcccagtgagacatatcgttacttcgacctgcccttctgctctcctgagaaagtgaaggagaagagcgaggcccttggcgaggtcctcaatggggatcggctagttgatgcgccttacaagcttgatttccgttcggaagttgagtccaaggcggtttgctcaaagaagcttaccaaagaggatgtagtgaagttccggaatgcagtagcgaaggactactacttccagatgtactatgatgatctcccactgtggggcttcattggtaaagttgagaagggaggcaaggccgatccgagcgagtggaagtactacctgtacaggcacatcatcttcgatatcctgtacaacaacgaccgggtgattgaaatcaatgtgcacactgatcagagtgcattggttgacctgacggaggataaggagacaaatgtggatttcctgtactcagtcaagtggaaggagacaccaacaccatttgagaagaggatggagaagtactccagctcctccaacatgccgcaccacctggaggttcattggttctcaattataaactcttgtgttactgtcctcctcctcacagggttccttgcaacaatcctcatgcgagtattgaagaatgattttgtcaagtatgcccatgatgaggaagcagctgatgaccaggaagagtctggatggaagtatattcatggtgacgtcttccggttcccaaagaataagtcgctattttccgctgctcttggcacaggaactcaattatttgcactcacaacctttatatttcttcttgcacttgttggagtattctacccttacaaccgtggtgcactatttactgcattggttgtcatctatgcactcacttcaggaattgctggatacgttgctacctctttttattctcagctggaggggacaaactgggtgaggaacttgctattgacaggatgcctgttctgtggacctctcttactgacattttgcttcttgaacactgttgctattgcttatagtgcaacagcagcactgccctttggcactatctgtgtcattgtgctcatctggaccttggtcacgtttcctttgcttgttttgggtggtattgctggtaaaaacagcaaaagtgagttccaagctccttgccgtaccacaaaataccccagggagattcctccacttccctggtaccggagaaccattccacagatggctatggctgggttcttgcctttcagcgccatatacattgagctatactacatctttgctagtgtttggggccacaggatctacacaatctacagcattctgtttattgtcttcatcatcctccttattgtcaccgcgttcatcactgttgcactgacatacttccagcttgctgctgaagaccatgagtggtggtggaggtcattcctttgcggaggatcaactgggtttttcgtgtacggctactgcctgtactactactatgcgcgatccgacatgtctggcttcatgcagacatctttcttctttggctacatggcctgcatctgctatgcattcttcttgatgctcgggatggtgggcttccgcgccgccctgttctttgtccgccacatatacaaatcaatcaagtgtgaatgagctgttgctggggagacgaagagcagcagagttgtacccgtttttggtgccccaccgagaggtcccagatatagaaaaggttagctctcgcatgcgacaggagcagctagagattgccatgtttcagagtaggccaattatttataggaacaggtaatgaacctataaatttgttctgtttttgtgactgctgtgataaaaagaccgtctgttccttcgtcctatgtatcatctcctagtgacgtcagacagcactataactttgttggaaccgtgacatgcctgaatatctgtggaaaaagaaacccgtgttatgttgttatatatgttctctaaagcatagaataatagaagtgtagacctctagtgtggcaggttcatctgtacgtgtatcctcttcgttcttgttcactgcggagcgttggactctatacatacccccagacttttggtactgttgt

SEQ ID NO: 4980 - DNA, 1435 bp, Zea mays
gtcgacccacgcgtccgcggacgcgtgggcggacgcgtgcctccccacccaccaccgcgccgggccaccaccacccactctaccctcccctccccaccaccactagcacccaccgtcccggcgcggagaccgcttccctccctccgcctccgcaaccctctcccgcctcgcccgcgcctccctccatttgtccgcggctcccctccctcccgatcttaaccacccgccacccggcttcctctcccccttcttcctccctcaaaccagacgctcgcccccctttcctccacctatcttcttcagacgaccagcaggaggtacgagcaagaccacctaggaggcctctctctctctctccccagccacccccgtagcgagagggagggcggaagaggatgagcgcgtccaggttcataaagtgcgtcacggtcggggacggcgccgtcggcaagacctgcatgctcatctcctacacctccaacaccttccccaccgactatgttccgacagtgtttgataacttcagtgccaacgttgtggttgatggtaatactgtcaacctcggcctctgggacactgcaggtcaagaggattacaacagactgagaccactgagctatcgtggagctgatgtttttcttctggctttctcactgatcagtaaggccagctatgagaatgtttcgaagaagtggatacctgaactgaagcattatgcacctggtgtgccaattattctcgtagggacaaagcttgatcttcgagacgacaagcagttctttgtggaccatcctggtgctgtccctatcactactgctcagggagaggagctaagaaagcaaataggcgctccatactacatcgaatgcagctcgaagacccaactaaacgtgaagggcgtcttcgatgcggcgataaaggttgtgctgcagccgcctaaggcgaagaagaagaaaaaggtgcagaggggggcgtgctccattttgtgatctaatcatcggtagatgaagaaacaagggcgaaggtgccatggctttatcatcgtcgcgtcttgcttcagtggaacggcatggatggtccccaccccccctaggtttactggcggctcggctgcagcgagttctcatctctttgtcgaggcattaagcgatatgtttgtttcattttcctccttcctgccttgtgattatctggtgtgtgtgtgtgtgtgactgacgaagtcgcggcgattaggtaactcgcttagaaggtatttcccgtgtttgagcaaaagaaagtatccctgttatctctgttccataagttagacatgatgtaatcgtactaagtttatttttacttatttcacttgaatggaaaagtatgcttcccatttaaaaaaaaaaaaaaaaaaaaaaacacgaactagtctctacgagggggggcccggtaccca

SEQ ID NO: 4981 - DNA, 761 bp, Zea mays
  misc_feature (1)..(1): n is a, c, g, or t
  misc_feature (9)..(9): n is a, c, g, or t
  misc_feature (15)..(15): n is a, c, g, or t
  misc_feature (46)..(46): n is a, c, g, or t
ngtgccatnacgtcnttcttatccgattggccttccattccttctntaaataccggccggcgccgaaccggccggaaagaccaccgacgcgtagcacagtccattattgccgtctcccttttgcgtgagcaaagaaagagagcgagaagagcagtcgccatgtctggcatcatccacaagatcgaggagaagctccacatggggggcgaccacaagaataaggaggaggagcaccacaagaaggccgaggagcaccacaagaaggaggagggggagcaccacaagaaggacggcggggagcacaaggaaggcatcgtggagaagatcaaggacaagatcaccggcgagcacggcgacaagtccggcgaccacaaggaaaagaaggacaagaaaaagaagaagcacggcgagggccacgaccacgacggcggccacagtagcagcagcagcgacagcgactgagatctggtgtcgcagcacaggtgcaacacatgtatgcttgctggatggaggattcataccagctgatgctgatgtagtgtttcactggtgtcatgcatgtatcgtgctattataatcaaaaagaaaaaagaaataacagtcagggatggtttgtttgccatgtgatcttgtacactcctacttaaattatggctgctgcacggtgctgctagcttgtactaataaagtgttgatctgcatgcttgcgtcttaaaaacacgaattcatgaacaagacggatcgaggagatccgcgtcttt

SEQ ID NO: 4982 - DNA, 1492 bp, Zea mays
gcacgagctcctccactctccctccatccatttaccaccccaccccgccgccgccctcctcttctctcccctgagcctgactggaaccttcccgagagaggatacaaaggcacccggatcggcggcacgaacgcccgggattccattccattccattccacacaaggctaggcacaagcgaaccaaacccatggcgtccgacggcagcggcgtggtgacggtgtacggcagcaacggcgcggagctgctggagccgtccaagcagcccaagtcggcgactttctccgtcaaggtggggctggcgcagatgctccggggcggggtcatcatggacgtggtgaccccggagcaggcgcgcctcgcggaggaggccggcgcgtgcgccgtgatggcgctggagcgggtccccgccgacatccgcgcgcagggcggcgtggcgcgcatgtcggacccgggcctcatccgcgacatcaagcgcgccgtcaccatcccggtcatggccaaggcccgcatcgggcacttcgtggaggcccagatcctggaggcctgggcgtcgactacgtggacgagagcgaggtgctgacccccgccgacgacgcgcaccacatcaacaagcacaacttccgcgtccccttcgtctgcggctgccgcgacctcggcgaggcgctccgcagggtgcgcgagggcgccgccatgatccgcaccaagggggaggccggcacgggcaacgtcgtcgaggccgtgcgccacgtgcgctccgtcatgggcgacgtccgcgcgctccgcagcatggacgacgacgaggtcttcgcctacgccaagcgcatcgccgcgccctacgacctcgtcatgcagaccaagcagctgggccgcctccccgtcgtgcagttcgccgcggggggtgtcgccacgcccgccgacgccgcgctcatgatgcagctcggatgcgacggcgtcttcgtcggctcgggcatcttcaagagcggcgaccccgcgcgccgcgcccgcgccatcgtccaggcagtcacccactacagcgaccccaccatcctggccgacgtcagcacggggctcggggaggccatggtcggcatcaacctcaacgacccaaaggtggaacgatacgccgccagatccgagtgaaccctttctttccgtagtcatctccatccatccatctgccttggattgcatttccgtcgtctcatgtctctcaatcagtaataatggaatgaatgaaatggtaagaaacaaagctatggtactatgcagaacctctttaattttgtgctactgtactaagttagcctagtccccacccccaccctggattatcatgtacccaaatgttggatggattgtatgtctgtcactgagccagaccttcttattgctatgaacgatgaatcaatcctctttctcgaggctaagacggctaaaaaacttgatccggttgccatatcggaaaggttaagtgaatcacatcatcagg

SEQ ID NO: 4983 - DNA, 2288 bp, Zea mays
  misc_feature (2286)..(2287): n is a, c, g, or t
ctttcccttcctcgtgccgacgaccgggcgaccgccgcgccccggcccgcgcccccttgtctcgggccactcgccggcaacgagcagccaccaggaaatgttgtgaggactgaaaagcaggctcctgcaggaccatggacggatgtgattgcatcgagccactatggcctaccgatgatctccttgtcaagtatcagtacatctcagacttcttcatagccctcgcgtacttctctattccgttggagctcatatatttcgtgaagaagtcgtccttcttcccgtacagatgggtcttgatccagtttggtgcgtttatagttctctgtggggcaacccatctgataaacctgtggacgttcaccacacatacaaagaccgttgcgatggtcatgaccatagcaaaggtttctacagcagttgtgtcctgtgcaactgctttgatgcttgttcatatcatccccgacttattgagcgtgaaaactagagagttgttcctgaagaataaagctgaagagcttgacagagagatgggactgataaggacgcaggaggagaccggtagacatgttaggatgcttacacatgaaatcagaagtactcttgacaggcatatgattttgaagactactcttgttgagctaggaaggaccttgggtctggaggaatgtgcattgtggatgccatctcgaagtggttcaagccttcagctttctcatactttgcaccaccagattactgttggatcatcggtgccaattaatcttcctgtcatcaatcaagtgttcagtagcaaccgggcaattataataccccacacatctcctttggcgcggattcgacctcttacagggcgatatgttccaccagaagtggctgcagtccgtgtacctcttctccacctttcaaacttccaaataaatgattggcctgagctttcggcaaaaagctttgcaatcatggttttgatgcttccatctgatagtgcaagaaaatggcatgtacatgaattggagctggttgaggttgttgctgatcaggtagcagttgcactatctcatgcggctattcttgaagagtccatgcgagcacgtgatttactaatggagcagaatgttgccctggatttagctcgaagagaggctgagatggctatccgtgctcgcaatgattttctagctgttatgaatcacgaaatgagaacacccatgaatgcaataatagccctttcctccttgcttttggaaactgagcttactcctgagcagcgtctaatggtggaaacagtactgaaaagcagcaatctgttagcaacactcatcaatgatgtgctagatctttccaaactcgaggatggaagccttgaactggagattaaagcattcaatcttcatgctgttttcaaagaagtgatgggtttcattaaaccaattgcatctatcaagaggctatctgtatcggttatgttggcaccagatttgccgttatgtgccattggtgatgaaaagagactcatgcaaactattctgaacatctctggcaacgctgtaaagtttaccaaggagggacacatcacacttgtagcttccattgtgaaggctgactctttgagagagttcagaaccccagaatttcatccaactgcaagtgatgaccatttctatttgaaagttcaggtaaaagatacaggctgtggaattggtccacaggatctacctcatgtatttacaaagtttgctcatcctcaaagcggaggaaaccgagggtttaatggtagtggtcttggccttgccatatgcaagaggtttgttagtctcatgggagggcacatctggattgacagcgaaggaaccggaagaggttgcaccgcaacattcgtcgtcaagctcggcgtgtgtgacaacacaaacacctaccagcagcagctgatccctctagtatggccaagcagcgcagactccgatttgcgtgctccgaaacctcttccggacgggagaggatctactcccttgaaatctcggtaccaaaggagcgtatgagcctagtgtaaatgattgacggcatagtgccaagtaggggaccgattagtgccaccgtctaattttgtttgtaaccctgtcatagcaggcatatgatgtacaaatactgtaaagcaaatggagactgcggccgtgtatctgggtggcaacgctgacttgctgcattgagtggtatatacatatgctaccagcggattgaattgcttaaaaaaaaaaaaaaaaaaaaaaaccgtgtgcgaccaccgtnng

SEQ ID NO: 4984 - DNA, 2139 bp, Zea mays
gaagctctttttcttctcgagtagcagcgcgccccctccccgccccacactaaaacagccacacgctcgccacccatggccaccaccaccaccaccaccacagcacaggcccactgccaccgctaccgctaaccatggcctcctcagcgtccctgcagcggttcctcctgccctcctcgcacgcggcggcgacggcggcctcgccgtcctcccggctgcgccgcacagggcgcgcccgcgcggccgtctccgtgccgccgccggcggcggcgggggagcaggtcccgacggagcggctggagccgagggtcgaggagcgggcgggcgggtactgggtcctcaaggagaagtaccgggcggggctgaacccgcaggagaaggtgaagctggagaaggagcccatggcgctgttcatggagggcggcatccaggacctggccagggtccccatggagcagatcgacgccgccaagctcaccaaggacgacgtcgacgtccgcctcaagtggctcggcctcttccaccgccgcaagcaccagtacgggcggttcatgatgcggctgaagctgcccaacggcgtgacgacgagcgagcagacgcggtacctggcgagcgtcatcgaggcgtacggcgccgacgggtgcgcggacgtgaccacccggcagaactggcagatccgcggggtgacgctcccggacgtcccggccatcctggacggcctccgcgccgtcggcctcaccagcctgcagagcggcatggacaacgtgcgcaaccccgtcggcaacccgctcgccggcgtcgacccccacgagatcgtcgacacgcgcccctacaccaacctgctctcctcctacgtcaccaacaactcccaggggaaccccaccatcaccaacctgccgaggaaatggaacgtctgcgtcatcggctcgcatgacctgtacgagcacccgcacatcaacgacctcgcgtacatgccggccgtcaaggacggcgagttcggcttcaaccttctggtgggcgggttcatcagccccaagaggtgggccgaggcgttgccgctcgacgcctgggtcgccggggacgacgtcgtccccgtgtgcaaggccatcctcgaggcgtaccgggacctcggctccaggggcaaccggcagaagacgcgcatgatgtggctcatcgacgagctcgggatggaggtgttccggtcggaggtggagaagaggatgccgaacggggtgctggagcgcgccgcgccggaggacctcgtcgacaagcgctgggagcggcgggactacctcggcgtgcacccgcagaagcaggaaggcctgtcgtacgtgggcctccacgtgcccgtgggccggctgcaggccgcggacatgttcgagctggcgcgcctcgccgacgagtacggcaccggcgagctccggctcacggtggagcagaacatcgtgctccccaacgtcagcaacgagaggctcgacgcgctgctggcggagccgctgctgcaggagcagcggctctcgccgcggccgtcgatgctgctcagggggctggtggcgtgcacgggcaaccagttctgcgggcaggccatcatcgagaccaaggcgcgggcgctgcaggtggcgcgggaggtggagaagcgcgtggccgtgccgcggccggtccgcatgcactggaccggatgccccaacagctgcggccaggtgcaggtggcggacatcggcttcatgggctgcctcaccaaggacagcgacggcaagatcgtcgaggccgcggacatcttcgtgggcggccgcgtcggcagcgactcgcacctggccgacgtctaccggaagtccgtgccgtgcaaggacctggtgcccatcgtggccgacctcttggtggagcggttcggggccgtgccgagggagagggaggaggatgaggagtaggaccttcgtcaagcgccggctgggactgtcctgacctattttatgaggtcttgattggatgtatatatatattcatcttaatctatatggatttctgaagtttgatctaaagtagacgcgctgccttcttccatggcacgatttgttttggtattgtcgtagcaacaaaatgtccccttattcacgtcacagagaataagtgcacgcttca

SEQ ID NO: 4985 - DNA, 1980 bp, Zea mays
  misc_feature (1964)..(1964): n is a, c, g, or t
tcgagttttttttttttttttttaatataagttttaaccatcaataataccaatagcataagccacaatgactgaaagtaagaacgttctgtccgaactagtataaatcttacattctccaccgcgtacacgctccaaaactcagaatacgcacaataaatttaatttacttgtcgagcaagattcgaaacaccaagaagtagattctcacaaaaccatagtatcatctacgataaatttcttcatgtttgaacagtatcaggcgcacatttcaatttgtaatatggcgctcgaaaactacacttaacctgtccaaaaacattgggttaatcctcatctttcctgggagacttgaaattagcaacaagacgacgacgaccggcatcatgagctcacggtcgtatccatcttggaggcgtcttcgatgcccttgaaggccacacggagcttcctcaacgaggacactttcttcccgttgttctctgccatgcccgtggcatggacagtggtgtatgggacctctttgagaagctcaaacatggggatgctcaggtttggccgtgtcatctgctccagcacctccggtgactgcatgtacaggttgttaccttcgtgcgtcacgctggctttcgacatccgcaacttggggtgctcttcaagcatcttgatgaaatctgaaagagtagatgacgtatccagctcaacaagggtaccaggcccacatacaaggcaatctttgtctctgacaaactcagttactttaatgtgtgttccttccagaccgttgtacgtgagatagtttgacacacttttgctgcacccagaaataagctttaaggcttccaatgcacaagcagccgatataattgcattcgttgatgcaatggctgggattatatttttgacaacaccctgtgtcaaagaatatgtaacaccagaaataccgaaaagctctgctctctttaaagcctctgaataaatccactgcatatgctctgcatcatcgccatcaaaaggttttccaggatgaacctcatcccatttgatcaagtgagcatactcaatgcagtgagctgcagttcttggtgtctcggcgagagtacataaagggaacttaacctgtggaggaaaaagccatatgttgcattcaaagcaaggtgttgttccaggtataatgactctagcgtgtcccttgaagccctcagttccaccatctaccataggtttaaccgtctcttggagtggattgtcacttgagtcataatctaagaaaccacaagccacagaattgatgtagcttcgagcttcaattgaatccagacctaggacaattatgtggaactgactgtagaactctatctctttatcttcaatcctgcaaaaatgaggaactatgttcaccccattaactcgctccataaccctcttcgctgctacttcagccttggacttcccaacatcttgaactctgaagagaaactggcgattgaggttggagacgtctatggtgtccatatcaatgacgtgcagtttcttaaacccggagagagccaggtccttgaggagctcgcagccaagcccgcccgcgcccacaaccaaaacctccacgaggctccccagtaggtctcgcaggccggggctgggatcgaaagtggcctccacgaggtttccagggcgggacaagagcatgtcgaggtcacgccaccgctcgagttccgtcggcgccggctgttccgcgtcaggggaggccatcgcggcggcgctctggatttggctctccttcgagcagcggggaggatgagtaagggggcagcgggatgcgcggctttgatggagataatcggcgcacctgggcaccgaccaccgagcagccgaggtttggttgtggtttcttcgaaaaagtaaataagctcaactccggttccgctgccggcccggccggatccgagggacccaatcgcccncccccccccccccccc

SEQ ID NO: 4986 - DNA, 1465 bp, Zea mays
  misc_feature (1455)..(1455): n is a, c, g, or t
ccgggatggaggctttcctcctgaagccattatctattcttaggtgattatgttgatcgaggcaaacaaagtttggagactatttgccttcctcgtgcccgcccgacccagtaccctgagaacttttttcttctgaggggcaatcatgaatgcgcctcaataaacagaatatatggattctatgatgaatgcaagcgtcgatttaatgtgcggctatggaaggtcttcacagaatgttttaacactctacctgtggctgctcttatcgatgataaaatattatgtatgcacggcggactctctcctgatctagcacacttggatgagataaagaacttgcagcgtccaactgatgtaccagatcaaggtctactgtgtgacttgctttggtcagatccaggaaaagatgctcaagggtggggcatgaatgatagaggggtctcatatacctttggtgctgacaaggtttcagaattcttgcaaaagcatgatcttgatcttatctgtcgtgctcaccaggttgtcgaggatgggtatgaattttttgctgacagacagcttgtcaccatattctcggcccccaattattgtggtgaatttgataatgctggtgcaatgatgagtgtcgatgaaactttgatgtgctcattccaaattctgaaacctgctgagagaaaaaacaaatttatggggtccaacaaaatgtgatagtgaaagccattttgcttccagcagctctagcctcttaaggttctcctgtggatgcatcgagacaacagcatgctggcgccaagtttgagggcagcattgggctactatcagagaaaccaaataatcccatacctaactgttcatctggaagttactcatcatgacaagtgcctgaaatttttcctctttcctgttaccttgtgtcagaacattatgtagctgtagatatattgattatggaaggatgaagttgccaaattgacctgaggagattcctttctccagccaggaaaaattctgaacatcaaggagtttctgtttgcaagtttcactatttaaaagcagttatgttgcttgtgcggaggtaagtactggaccgaggcagtattatcagtttcatggatatggactgttgtgatagtttcgatagaggtgtcaaacatcaattagggtgaagtggtgagcaacatttcaaggaggtgctgatgcttgctgacaacctatgaaaaggcgtttctgtagctgactacttggtttgtccgtcagacaattctagacgtgaattttgatctgttggctagattagctgccaagtaggtatttcgtatctctagatttatgggattcacattcactcgttcttgttgctattcacttgcctttgttatgttgctacatgggtgccaaacgcggtctgcaaagcagtcgtttcggtttgtttggtaatgcattttgcgcaaaaanaactcgaggg

SEQ ID NO: 4987 - DNA, 3641 bp, Zea mays
gcctggctctggcttctgccatcccactcagcagtgccaaggcccagcgccgaccgagccttcccctcgcctgatctgcgcgtccctgtcctcggctcctgagcactcgcgtactcgctcgtcgcatctgcccacactaccactggccacaccgaaaccctagctgcgcacccaaatcgatcgatccagggacggcagcggcacgacgcgccaaaataggttcagaactagcgtcgcgacaaaatcggttcacgaccgccacggttggaccagctgcgccgtggccgtgcggctgtgcggccggcattggcgcgctgcgcgctgctgcaggccggtgtgccgcgcggctgggcgacgtgaaacggatccacatcgtaggagcagaacttgctggtcgaggtggaggcttgctgcgtgcagcaggacagggagtcagggacaacagattttagcaaagtatgagctgtgaactagtgttagaggaaagcacgaaggaaatagtggcataaaacttgatttgtctaaagataaattggtttcttaaaatggctcagcaaatggcttcagttcatttgaatgatacaacagttgttgatgccaagcccttgcgtacattaactcccatgttccctgcaccactagggcttcacacgttcactcctcagaactcaccttcagttgtttgtgtgaccccatttggaccatatgctggagggactgaattggggatgcctgctgttccaccaatgtttgcagcgcctgtacctgctgcaggagcagaacccagccagagacagccgcatacagctaatatgaacggaggagacactgaattggggatgcctgctgttccaccaatgtttgcagcgcctgcacctgctgcaggagcagaacccaaccagggacagccgcatacagctaatatgaacggaactgcagtcaacagttcggtcacatctttgcaaactcctccttcagctgccacacaggaatctggtaagaggaagaggggcaggccaaagcgtgtgcctgatactactgtttcttcggctccttcagctcctctggctcctactatttctccagttccttcacttcctgtggttactccagttccttcagctcctcaggaattgaacactattgtttccctgacgccttcttcagacgccccacaagaatctggcaagaggaagaggggacggcccaaacgtatacaagacgttcctgtaatggttcctctgacctcgcaaggagatagcacatctgttattcagacacttccagggtccagtgtacatgaatctggtacgagaaggggacgtcccaaacgtttgcaggatagttcagatattgtcactccaattgactcaaaagatagtgagtcctctccccagccacctattgccgcacctgccgaaagtggtaagaggaagaggggacgtccaaagcgcattgatggttccgtgactccttcaagtcattctgttttttcaatagatgatgatgctgttgacacgatgaaacgtggacgacctaggaaaattgataccaaactgttacagtttccatctttattttcagatgatcctagacaaactgcagataatgtactcatgatgtttgacgccctgcgacgcagacttatgcagatggatgatgtgaaacaagctgcaaagcagcagcctaacttgaaagctgggagcatcatgaacaatgctgaacttcgtgtcaataaggacaagaggataggagaggttccaggtgttgaggttggtgatatgttctacttcagaattgagatgtgcttagtggggttgaatagtcagagcatggcagggatagattacatgtctgccaagttcggtaatgaggaggaccctgtagctattagtgttgtgtcagctggtgtatatgataacactggagatgatccagatgttctagtttatactggacatggcatgtcgggtaaggatgaccaaaaacttgagaggggtaatcttgcactagagaggagtttgcatagaggtaatccaatcagagtcattcgtagcgtaaaagacttgacttgtccaactggcaagatttacatatatgatggtctttacaagatcaaagaagcctgggtagagaaagggaaatctggtttcaacgtgtttaaacacaagttgcttagggaacctggccaacctgatggcattgcagtgtggaagaagactgaaaaatggagggaaaatccatcatctagagaccatgttatattacttgacatatcatatggtgtggaaaataaccctgtctgccttgtaaatgaggttgacgatgaaaagggccctagccgcttcacttatacaactaatttgacatatgggaattctctcagctcgatgagaaagatgcaaggttgcaaatgcataagtgtatgcctccctggtgataacaactgctcctgtacgcatcgaaatgctggtgaccttccttacagtgcttcaggcatacttgttagccgaatgcccgttttatacgagtgtggtgattcctgcacatgttcacaaaattgccggaaccgagttgtacagaaaggtacgcagatccgttttgaagtttttaagacaggagatcgtggttggggcctccgtagttgggatccaattcgagcaggcacatttatctgtgaatatgcaggtgaaatcattgacataaatagagtgaatggtgaagatgactacatatttgagacttctcctttagagcagaatttaagatggaactatgcaccggaattgctgggtgagcctagtctttctgactcaaatgaaacaccaaagcagctgcctatagtcatcagtgcaaaacgaaccggcaacatagctcgctttatgaaccacagctgctcacctaatgtgttttggcaaccagttctctatgatcatggtgatgagggatatccacatattgcattctttgcaattaagcatattcctccaatgacagagcttacctatgattatggccagaaccagcgtaatagtattcaaatgggaacccattctggttttcggaagtctaaaagttgcttatgttggtccccgaagtgtagaggttcctttggctaataaccagccctataaggaatatattggatcataatactccatttcaaagttacacctaagatatctgctggtcgacttttatattcagctcccaaaaatctgtcacaagtttgtgagagcaactgaattgtctttaccagcagaagcagcccgtcatggtggcctgtatgaagcagcaggggtctcctatgtcctaggtgttccatgcaccatcgaataaatccacccctcttcatgttagaatgggaaacggggatgtgttttgcacaaattatctgtcatgcagtcgtcgtattaagttttcttgaactagtttgtagtcatcctcagagaatgcatgatgtgcactttgtagtaatatatgcaggttgttatcccacctactatataaccatcaaaatttcagtgtttgtacaggacgccctatgtagtggcgctgcttgcaaatgttagttagtacactgatattccataattttactcctttccaaattaattcaacttataaaattattctaagtc

SEQ ID NO: 4988 - DNA, 771 bp, Zea mays
cctcgaggccggccgggatactccccccgtctccggcccacaaggccacaatccaagccgaagaaccctaggcggtggcggcgcatcctgcataccccaccgtagtggcagcgagccagcgacctcgagtagcagcagaggctccgcaggggcgaaaaggtgtgaagcttccttcggagatcccagtagcagaagcaacgcaggcatcggcttgcgacaggagaggacggagatgacgcagaagcagaccctgttcaaggggcagagcaagaagaagactatccctcccaaccgccacggcaaggcgcctcatgttcgtaaaggaaagagagccgtcaagcccaccaagttcacaaaggacatggacgccgagaaggaactcaccaagttcatcaaccagtgcaacgaaataaaagctgcgaatcttgctagcaaagagggcggtgacctcaacatagtgaaggcggatggcgaggaatctaaatcaaagaaataggaagccagaaactgaaaacgagtgtgtgaaacgtgatgcgtggtaaactgttaatgcgatgtattctgctgaagaaaattcagttccgtatggctgggtagatgaacatgtttagcgcaaagtgacggtgtaactgcaaccggggtaatggcttgcaagttttgttctgtgccatctctatttctccaattattatattgatgaagtttgtgtgcaaaaaaaaaaaaaaaaaaggcccctagggcccccctgcctcccatttaattaaaaataaa

SEQ ID NO: 4989 - DNA, 4108 bp, Zea mays
  misc_feature (285)..(285): n is a, c, g, or t
  misc_feature (518)..(518): n is a, c, g, or t
aatatgtatagtaattttttaagatctgcgaaggaaactttgtaataaaaaaggcgtactattttaggtgaagtaaaaattaatatacaccatattttaatatatgatatataaatgatatttttctgtgcgcgttctatacggagaaaggaatgtagaaaataaagtccggtaacattgtttatatagaggataaaatttagagaatattgctgaagtagaaaaaatatagaagacaaatgttttacatagaatatttatttagaggattaaatttagatactnctcatctcctccatgcatcagctcctatctacattttttttgttttgtgacagcagtagctccaacctttattatcttcccgcatacccacgcgcgttgttcaaaacaaaaatcccacaaaaatgaaaatcaaaagaaaatccattcacgacccacccaccacagaaatcagtttgctttgagtttaaaataaaaactttgctttgctttcttctgctgttgctgtgccgcgngtccggcgccggcaggcagtgtccccacaaccacaacacatacccgggcagaggtccccaccccagcatagataaaatgattatatcagggccatcgtccatatctcttctttgtattagtttttttataaaattccttatctatagatcttttatatcatcttttacatattagagattcatattaagctgtcttgagcggatggtgaatatgattgtgtaaaacattacataaattatactatttataagtgaagttttaaataaaggagaataaaagaaatccatattaagttgccttcgacatagatggtgaatatgattgtgtaaaatatcatgtaaactgtattatttataaagtaaagttttgaataaaagagaataaaagatagtatgagtaagctgtgccagatacctttataacctaatttcattttcttatatatttattgtatccttaaatattttatatatttttagttctaaaatataaagataaaaatgtgaaggtgtatatgtttaaacccccgccccccggccctccgccccgaacccttcgtcagtttcagtttggcacctccgaagcttccgtccgaatctctgctgcctccttcctcggccaggcttgcgggcgatggcggcggagcagaccgccgagcagttccggggccaggcgcggctgccccacttcgcgtccccgcggcgctacgacctgcgcctcacgcccgacctccccgcctgcgtcttcactggctcggtggcggtttccatcggcgtggccgcgcccacccgcttcctcgtactcaacgcagccgagctcgacgtcgcgaccgggggcgtcagcttcgcgcctcagggctccgaccaggtgctacaacctttggaggttaccaacgtgccagaagatgagatcctgattattcgcttcaatgaggtgctttctatcggggagggaactttgacgattgcattcaaggggactttgaatgataagatgcatggattctacagaagtgtgtatgagcttaatggagagaagaaaaacatggctgtaacacagtttgaaccagctgatgcaaggcgctgcttcccttgttgggatgagcctgctttcaaggctgttttcaaaattactctagaagttccttctgagacgattgctctgtcaaatatgccagtaattgaagagaaggtcaatggccctaccaaaatagtctacttccaagaatctccgataatgtctacatacttagtggctgttattgttggcaattttgactatgtggaagatttcaccacagatggtactagggtccgtgtttacacacaagtcggtaagagtgcgcaggggaggtttgctctagaggttgccttgaagacattggtcctgtttaaggagtattttgctgtgccataccccctccccaaaatggacatggttgctattccagattttgcagctggagccatggagaactatggcttggttacataccgtgaaacagcattgctatttgatgagatgcactctgcagctgccaataagcaacgggttgcagttgttgtagctcatgaattagctcatcaatggtttggaaatcttgtcacaatggaatggtggacacatctgtggcttaatgagggctttgcgacttgggtgtcttacttagctgcagatcagttctttcctgaatggaatgtttggactcagtttctagaggaatctacagtaggtttcaagttggatgctcttgcaggttcacatccaattgaggtggacataaatcatgttgatgaaatagatgagatatttgatgctataagctataggaaaggagcttctgtcattcggatgctgcaaaactatcttggggctgaggtctttcagaattctttggctgcatacatcaaaagatttgcgtattcaaatgcaaagactgaggacttatgggctgcccttgaagaggggtctggtgaaccagttagaacattaatgcattcatggaccaaacagcaaggttatcctgtcattactgtgaaactcaaggatggaaagttccaactggagcagacacaatttctttcaagtggatctacaggagttgggcaatgggttgttcccatcacactatgttgttgttcctactcgcgccaagcgaagttcctttttcatgggaaacaagaagattttgatttgtcagcgtccgggtttacggactgccaaaagaaagatggcttctggattaaacttaatgtcaaccagaccagcttctatagggtgagctatgatgaggaacttgcagcccgacttcgatatgcaattgaaaccaacaaactgggtgcagcagacagatatggtgtacttgatgatgcctatgccctctgtatggctggcaaacaaaagctagtctccttgctgcatttgatttctgtgtacaaggatgagactgagtatactgtgcttgcacacataatcacgacaagtctgcacattgccgagatgatggctattgctgctccagaggagttggttcatctgaagaagttcctaattgatttcctggagccatttgcgctgaaacttggctgggatgctaagagtgacgagggccatctgaacgctttgttaagaggtacactcttaaccgctctggcagaacttggccatgaggctaccataaatgaagctgttcgtcgatttaatgtctttctggaagacagagagacaccactccttcctcccgatgttcgaaaggcagcatatattgctttgatgcagacagtgagcaaatcaaacaaaactggctatgaatcactactgagggtatatagggaaaccgatctaagccaggagaaagttcgtgtgttaggttctttggcatcatcccctgaccatgatgttgtccgtgaagtattgaatttcatattgtcacctgaggtgaggaatcaggacgcaatatttttgctaagaggggtgagttcaggggcacacgaggtagcatggcaatggctgaaggaaaactgggattacatattgggagcctactctggaactctgctcacctatttcgtcaacataactgtctcgccactggccaccgatgaacatggtgacgaggcggaggagtttttcaagagcagaaccaaggcgaacatcgcgaggactgtgaggcagagcatcgagagggtgaggatcaatgcccaatgggtcaagaacatcaaggccgaggctgacctcggcaatgttctcaagaagctggcttacaagcactgatcagagacggtccactttcatttctgtgttagtcctagtaccgagatgtaactttgttctctggaataagtggattaataaagggcactttcgtttgtgtgtcgtcctgagctgccttgtccgtagattcttacaaactgttgtgcgaaagctatcatgatagatatgcgtcgaattgattgattctatatcctgataattgattgcgtatcgcccatgtcgcacaggagaacgataaatttgttccaataattgactgactgcgtgttggctttcaaaaaaaaaaaaagggaagaaaaggaggaacggaaaaaaa

SEQ ID NO: 4990 - DNA, 2474 bp, Zea mays
  misc_feature (2295)..(2296): n is a, c, g, or t
cgggccgcctccccgccggtgcctgtcccgaaagagaagtgcgcccgggccccgacgggagggacccctaatctgtcacctcccccaccgcacccccgtagcctcttcaatctcgccggccacctcacgtcctcacctcgcgtggcctcccgttctgacttcggagtccctcggtctcaacgactagttgagagctcgcggctccgttcgggcgaggggaggaggttcatgaggctgctgtaggctccgttgcagccgccgcgggcgggagtccgtgattttggacgccccaccgcggcaagatccggaagcgcgttggctgttgtgccgtgagtttcagtttcggtggtcgattgcttcagcctgctgagaagtaggaggggcggccatggcggggtcgaggttcgggtcgttcaagtcggagaagggcgactccgcctccgcagcggcggcagcgggtggagcggcgcagaggagggacccgtacgaggtgctcggggtgggccgcaccgccaccgaccaggagatcaagagtgcgttccgacgcatggcgctcaagtaccatccggacaagaatggcgatgaccctgttgcatcagacaggttccaggaagtcacattctcctataacatcctgtcagatcccgataagaggcggcagtacgatacatcaggatttgatgcaatcgaatctgatagtcaggaactggagctggacttgtcgagtctcaacactgtaaacacggtgtttgcagctctttttagtaagcttggtgtgccaattaaaacaactgtttcagctacagttttagaggaggcattgaatggttcggttatggtttctcaactccagctaggaaactcagtgcagagaaaggtggaaaagcaatcggcccatttctattctgtggatataactgaaaaacaagctaaaatggggctagtttgtcgtgttcactcaaacgataaaagcaaattcaagttgctatattttgagcttgaagaaaatggcgggcttagtcttgcactacaggaagacagtgtgaaggttgggaaagttactgctgcagggatgtatttccttggttttcctgtgtaccgttttgaacaaaataacctggcagctgctgcaaaagattctgatggtgcattctttaaaagattggatagctttcagccatgtgacatacatgaactgaaacctggaacacacttctttgctgtctacggtgacaacttcttcaagagcgctagttatactatagaggttgtatgtggtgaatcttttcctgccgaaaaggagatgctacgaaatgtggaggccaagatactcacaaaacgagctgaactttccaaatttgagtcagagtatagggaggttttggcgaagttcactgaaatgaccagcaaatacacacaagaaatgcaagcgattgatggccttctgaaggaaaggaatgagatccatgcttcctataccaacaatccacctctaaaacggagttccagcaggaataaagccaagtcgccttcgaaagtggccaaaactggtacagaaaaacatcatcagaaggaaaagaaggtgaaggatcactgcatggagggatgtggaagtgacagcgataactcaagtgaaaagaaatcaaaagagcggttcccaaggaagaaatggctgaaccttccattcaaacttgacaggagaaagacgtgctgagcaatgtattatatgttccgttgctattctatcctgttatgcataatcctgagctgaactcacatttcttctctttctcatgcttttataggaagtccctctcggcccaacactagattgatatacagagaatttccactgtggcctcccgaaccaagccctctcccactgctaccaccttccttcgttgtacccggattatttcgtgtaaagatcacatgtgatcctaagaattaaaacgtgagtcgttttagcatatattgtgaagcacgtgctggcaagttgccgttcttggcattgggtcaaattggggtgccctgcttccgattccgtgctgcaccgtgcctatgtagcatgtaaagttgtatatgctgcgaatcgtagtacagctatatatttgtgtgtcctgaatcttgagtgtctttttactgccttctgtaaatgctccccaactgatgtaaatacaaaattccatgttcctcgcactaggatccgtgtgccaaattaaaaaaatctaaaaaaaaaaaaaaaaaataaaaaaaaaaaaaaaaaaaaaaaaaaaaaaaaaaaaaaaaaaaaanngggccgtgtggaaaaaatgggaaaagtttttcctgaaaaaaaaaaaaaaaaaagggccccttggtccgcaccttttttctctttttagtagggttaaatgccccctttgggcccccgtgggaaaaatttgggcatggttttcccccaaaaaaaaaaaaaaaacggcccccccgacccc

SEQ ID NO: 4991 - DNA, 1525 bp, Zea mays
actcctaagggcgagtgggtctctcgcgcccggccgcgacaaccctttcccttctctgcttgcttgctgctgcagtgctgcctccccctcgcccagcagcagggagcagccatgccaggggaccacggctccaagggcgacatctccttcgccggacgcttcacggccagcgccatcgcagcatgcttcgcagagatatgtaccatcccgctcgacacggccaaggtcaggctccagctgcagaagaacgtcgtcgccgccgccgcctccggggacgccgcgccagcgcttcccaagtaccgcggcctgctcggaactgccgccaccatcgctagggaggaaggggccgcagcgctctggaagggcatcgtcccgggcctccaccgacagtgcatctacggggggctccgcattggcctctacgagcctgtcaaatccttctacgtcggcaaagaccacgttggggatgtccctttgtccaagaagatagccgccggcttcacaactggtgccatcgctatcagcatcgccaaccctactgaccttgtcaaggtcaggctccaggccgagggcaagcttgcgcctggtgtgccacgccgctacactggcgcaatggatgcttattccaagattgctagacaggaaggggttgccgctctgtggactggccttggaccaaatgtagcgcggaatgctatcatcaatgctgctgagttggccagttatgatcaagtcaagcagtcaattttgaaactccctgggttcaaagatgatgtggtcacccacctttttgctggtcttggtgctggcttctttgctgtttgtgttggttccccagttgatgtggttaagtcgagaatgatgggtgactcagcctacaaaagcactctcgattgttttgtgaagacgctaaagaatgatggccctttggcattttacaaaggcttcctgccaaactttgcaagactgggatcttggaatgtgattatgttcttgacattggagcaggttcaaaagctgtttgtgaggaaagcgacaagctgaagatagagtttttgcagtcaggtggcgtacaattgacgcacagggtttttcttctatagacaaaaggggagaaatgacacctcccccctcgagaattggggaacaaggacagatctgacacctcaattgcgagaaataaaaataacagccgacagttgcatgatccctgaacgaataaattcagaactagaaaacagatgtcagtaaacaacatgtggtgaatgttggaacttgaactgctctagttcagtgggcatctgttgttgcatgcttgggatggatttaatgtttcgttttttttcttccttgtactgaagtgctctgatcggtaacgatcactgtgtgtgaagtgcttgattgttatgtggtatcatgagaatgaataaacataataatggagctgtttttttattttttactgttttttttttttttgataaacaggtcgtccaaaggatgcactctttatagcaacatatac

SEQ ID NO: 4992 - DNA, 6000 bp, Zea mays
gatgagaatgactatgtgtaagtcagaattggatatgcatgtgacgcatgcaaggcagagacaggcctaggtagagattaccgtgagaccgaccctttgtgccgtggaggaaatatatactatccaagtcggcacagatgatgtgcttgagtgtcagcgcgtgcacgtctcaccacggtttcaacctcggcttacagatgatgtacacacgcacgcagacgcagccggtagtagggtcggcctgtgtgtctacagggaccggccggtctcgcagcgttcccttcattcctcttcgtcccctgcagcgacgtcccggtcgacacaacgccaccaacacgagctggttttccgtcgccggatcatcggatatctctgtgtggttttgtacggggaagggacgcgtcgaagtcgaagtcatcaagggcaagggcgccgccgagatccaagaccccgggaacttgatccaaggcagccaggcgcaggttccacctcgaccgtcactgccctgcgccgcgccatcagcgccgtggaggtggatcggatcggggacggagatgattatcaccatttcgcaccacggtagttagctcgtccttacgatcgagctcgagagttcagactgtgatctccatggatgaaggtactctccacgactccacgtatggcgtgtccgcagctcgggtaagcaaccacggaggacgacgacgcacctgctatgcagccgtagctatcttagtacccgatcccctgacgatccgatccgatccatcatccacacgcgtgttcatccgccacgaccactcactcgcgccgattgcagttccgcagagctattggagcgtggatttgacgccgcccgtttccatcacgcgcgacgacgcccaaccacggccctgcctgctttgacctcttccaggccacctctgtaacaaaaaaaaactctccaaactcgcccagttcatctccccaacgcgagatcagatccaaccattcgaacggattcgtgcgccgtcgagcatctccaaagatttcgtggacgaaaccagttgaaggaggtagctcgtgacgcccggtacactttcttcccgcaacaccatcagcagcaagagctcgggtcactctccatcgatcatctccagagatcggatcggagcgtggcaacgcaaatgcagctacgacggcgggcctccccgtggacgggcacgccgcagggcggcggagctccgacgagccggcgcagaaggtggccgcgagtcacacaccaccaaggacggggtgctgctccgggcgtgtgtcagttgcctcgcgttccggccggccgtagcccgccgaaacgacgtcggttcggcgagacccggggctccccgccttcctctgctagcctgctacgcggccgtgccgagaaaccgcattgttcgccgccgcgcccggtgtcgccggccggaaatcccgtccaaactcacacaaacgcgccgtccggaccagtccgggttcccgagccaatatctccgcgtacactgaatggaatccatgggctgtacgctcgttcggaagctatgttccgttactacgaggctgcagagtttgagacagatatgttcatcaggcgaagagatattcgatcgcaaatcgggaggagaagcacactctgagccccagcatcgcgaccccggcggccggctgcgcctgcggggcaggaatccgcggcaccgcgtgggcgcgatctggcggccgttggatgtggatggaacggacgggccaggttcaacgtgggggcgttgatgggagcgatccgaggcgaggccgtgtggaccaatcagcgcgctgcgtgggactctgctcgtcttcgtgccgtcgccactatttaagcaccgcttcgtctactccggcctactcacccagcaccgcagagctctcatcctctctctctctctctttctcgcgctcgctttgcttcctcgtcgaggtccaagttcctgcattgatggcgaccgaggtggctgagactcccgcgccgttggcggaggcggtccccgagacccccgcggaggcaccggcggcgcccgccgccgaggcgaagcctaccaaggccaagaaggcctctgcgcccaagaagcgtgccaacccgacccacccgccgtacgccgaggtaattgcagcctttgtgccacgttagcttgcacccatgtcgtgtatgtcgcgtctggatctgacggaattgtggacggtttgctggtgcgcagatgatctcggaggctgtcacgtcgctcaaggagcggacggggtccagccagtacgcgatcgccaagttcgtcgaggacaagcacaaggacaagctcccgcccaacttccgcaagctcctgctcggccagctcaagaagctcgtcgccggcggcaagctcaccaaggtgaagaactcctacaagctgcccgcacgcgccccggccgccgccaagccgaagcccaagtccaagaccgctgtgaagaagcccaaggccggtgccaagaagcccaaggccgccaccaagcccaagccgaagcccaaggccaagtcccccgccaaggcgaagcccgccgcaaagcccaaggcagccgcgaagcccgccgctaagccgaaacccgcagcggccaagcccaaggcggccgccaagccgaaggccaagccagctgccaaggctaagccgaaggctgccgcggccaagccgaagccagctgccaagaaggccggccgccccgccaaggccgccaagacgtcagccaaggacacgcccgggaagaaagcggcgcccgccaagaagcccgccgctgcggccaagaaggcccctgccaagaaggccgccccagccaagaaggctgcgaccccgtcgcggaaggtgccgtcccgtaaggcgaagaagtagagcggtggtcttggcaggaatctagggtttcgtgctccttcgattttagatgtttactcgtttttgctctagttgtgggtggtgcgcggggtgggttactaggttgtaaatttgatgtcggaggctggggtacacatgggcattctgtaccagcggtggaaggcgccggcgacgatgacgaaccagtgtgtgttattattattagaagacaacgttgtatttctgtagctgaattgttgagttgcggatatcattgtgctgctaaggttaatgtgacgataaagttaatgtcaagagttaccttccttcgcgtgtatgtactctgattattcaggctgtttttggctgggattaatctggtcttatctgaattccctatctgaaatagagaattgttcggtgtgcattttgtgaccaacctgctcatgcaaacatgttgctttcgttgtacgtcacgtgtaaggcattctacgtggctttatgagctgtaataacggtcttatattattgttctcgggattttcgtatcttttcggatgagggtatatgcggtttgatgggctgagctgctgtggttgtttgaaaccctagcgggcctcgcgttgcatatatcttgacggcccgcggcaggctaggtctgctgggcgtttcggagccgtaacagccctaaccctaggtagctgttgatcctcttgttgctgtgaaactttcttcttttgccttgccctgccctctactgcttttccacctttgtttggtcgttcttgcatctcgtcgggttttgctggagtgagaacgagttcactcgcctttccgtgcatcgcgtcgttctggactggaggagtcggggtggacatcttcctcaacctcgtgatgtgataccggtaactggactcaaatctgctttgctgtgtcctgtctcgaatgggcacacacacgaatccacgggaccagctggcgaaacaagtttactcgacccgatccctatacgatacggcaggtggtgctttccgacctgcatcctcttacccttctgtggaatgtggtccgacttttgtgacattgtcagtccactgacgtccggtgcgttgcacgggaagcacgagctcgcctgctcgtgcgcgcggaaagctctccgtgagaccgtgacggcatctacgcctcgccatttagtagcaaactcggagctgggcgagttggcgctggtgaaccgcgaccgggcacctgacgaacggacggaacggacgcacgcggctggagcaggaacgaaacctatggttttctctactggacttcagtttgggatgggcctagcccagctgtgtgtgacgatacctggggggccctggctggtccccggttaagaatcgttagcccacgagttgctctcttgtcggtttggccggcccaacccagcgcgagaccaagcgactggcgccgctcgctgtgagtctgtgacacgactacacgagatacgagtggcggactggatgtcaaattgaaatcttgtcggtttggatttttatgcgccaaatggagtaacaagacatatgtttagagtgtatctattttatgctttgataacatcgtgaaaaaagatttgatcaaacatatggtcgaggataaaaaaaactaggcgtcaaaactttgatatactctgcgcggtagctcaagcttcaccatcaagctccttcaatttttgtgcatagtacaccgacaagaacggcttgctttaaaagaagctaaagttagcattagattgtaccataagacatgtatgatgaatggaaaacaagtagtgtaagctttgctttggtgcaaagagtcacctttttttcgtaacagtccaaggagatgagccgtcatcaaaggctaattgccactcctcacctgtgttacggtatgcggctatgcgaatcgtcgatagagcctggaaacgtatacaaagcaacgttattcagtcaggttgcaacgtcgtcatctcgacgtacgtaatgtttataaaacatcgcacttcagttgccgattgaatgaagtagtactaatttctctctcgtatcaccgtaccctcaaagaatctcatagcaggtgtcaaagaatctcatggcgttgagtcgggtctacgagtttcaacgtcgatggtgttcatgcttatgtgcactacgcacgctttagatgggatcagaagaggtgcagtggcacgactgatgatttattggcatcggctacgttgttaagcagtcgtagagttgccgtgcccccgtttccgcacctgctactgttcgatgtgagagtaaattaaaaagaagctgtcctgcaggcctgcagctgcagtccacactgtgccgagcgtaggcactcgttagcctgtgcgctcaagtagtttaatctatatcaacttctacagttctactgattgtataatattttgtatagataaattatcgttatagtagtccgaacagtttggaattaatcttctaatttaacgacgacgttctgacctgtgaaagaaaaggctagttttgctcgtgctgaaacatcttggtacctactactatactgtggcgtgctgcgcgtctaccgaacacgtcggtgggccaaacagaaatgggggtgcacgtccggaagcagagcaccgatgaattgggggtgctaccgctgcggcgaagggttacggttgactggcctaactgccggtgccagctacaagcatccgatgttgtgttgctcacagtacagtggccaacggggaccggatcggccactcccactccctacccgctgaccgagcggtcgcgactccccgtcttcctcgcggcaccgcggggctccagcatccagctttgctgggggcctgtggctgtcatggccaaggcgctgtggtgagcagcagccggcagggcatggaagacgtgcctctgccagcacagtgaagacggacactttactgctaccgtgtctgcatgtgcgtgacattttgaacaacctaacctaacctaaccaagtacacagcctacgcaagacccaacgaagtaggtaggtaccactgaccgccacttacacttgggcccgaacggtgagcacggtacactcttgg

SEQ ID NO: 4993 - DNA, 5335 bp, Zea mays
ctaaaattagggttttattgttgagcagaacattttgttgttggtgccctagattatggtctggttccgcgttcatcccaacaaataccaaacaaaccctttgattctcgcatcaagatttaaggaatcctattttgcagtactaacataaattgagggggcgcccttgggttgcttgtgttccgacaaagtagcatatgaggcatttattaacatacccccccacgttacatttcctcgcctgtccagacgttgagccagccaacaaatagtaacaataaacaatagtaatccttacatcacaccagtgacttacacgggcagccgattccatcggctgcaaaatttatcatgcatgatatggtatcgcttcgaatgtctttttgcagtgcaacagcacactctattttcttctatgcaacaaaatgaaccaaaaacatacacaaccagcaccatgccacaatcaccaaaacaaaccagaatagacagacatggagcgaaaatatgtttcacatgtgtctgatgccaaggatgctctgagctgtgtaccagcgtggagcaggctcagtgaagtcagcaccaccactctctagcctgacgaggcatggccacttgttgcagagggcttcgcaacgtagatctgcttcatcctaccagtgcctgaactcctgtcggaaccagaaccttgattcctaccctggtaccctgatcgtcgctgccactcgttaccagtaccagccttctgagtcgcacgggcacggcgatcctgattgttaaccagatgctggtattgcgggtctgatgatgatgacgaggactgatgggtcttggaaggtatgctggtgacctggggggcgttcgtgctgccagccgcccctgctgcaattccagggttgactttggatggggtcaccctaaccatggctttggcactggttgggacttcattgctgatcaagcccgcctggccaaacgaaggctgaacagtttgggagcttgagctggttgaggctggctgttcgacaagacctaactcatccctgtactgagaaacggctgcatttgggaaggttttgttgccgtctgatggcccagcagaagcagaggactcctgaaatcggttatttgtaccagacttgtctattggcacgttatgaacaaactgttgtgtggctgtaccctctactggatgctgcttaagtgcaactgataatggaactgagtgtagaggaggtacaggcatatgtggccagcacgtttgcatctgtatgtctgtagatgtctggaaaggagcaatgtcgaacatggtcaatggagacgggattggcatgatagaagttgggcgtagatgtggaactggagcaggaacactaggagcgtttacttgaccagacaccatattttggctgtttggatcactctggcttacaccaacaataggtggcccttgactttgcttccagtcaggctgcttgtcaccagggatataagtggctcccataaaaccaagtcccatctgaccaaattgacctactggggcgaagtggttatagaccaccatatgtgggggggcttgcacgcctgggattcctcccggagtgatgaaaggaccagcgtacccagttggagggcggtagaaagagtctaccccagaatgacactgtggccaagctcccaatggtgctgaaggcaatgcattgcttctttgagggtgctgaccttgagaaccagcagattcgtcacttgggccaaatgcaaaaatgtgccctcctaacatcgagttcatatcaaagcaggaaaagtgggatggctgtgcaccatgaaactgagaaagcattggccctgatgcttgtggactggctataggaggccacaaggacatggatggagtatcaaccgataagtctgcaggaagagcaactgcgagtggctcttctgtggatgattgaccagcttgacctgttcttgcccctcctgatgttaacccactgagatccttgcttgtaaagctcttgtctggagccgatgcagtagttgcatcagctggagatccctcatcagtgctaatagctgccacagccacagcagaagcagctgcttcagcctctgcttccgcatcctcggtactcggacataattccttggaatttgccttatcaggaccactgttatcgctaggcaagcctcgatcgatcttcatatcaggcctagatgaacctggagctccaagaccacttgaaacagttcggctgactgggggtagcatggttggtgacgttactgccccaaattgaatcttctctccagccagaagggagttaataggactagcagatgaaggcaacaccttttctgtgattactgtgggagacaaagcattgttggactccaacgaaaagccaggcccagcctgctgttcaaatttagctggtcccatagcttcttcaagttgagtttgagttaatggcatgacctgttggtttatttgtgaattatccccaggaaacccatgttaaatggagtactaatagatggccctttattgtcgccatcagataagccactcacaagctttgcaggactcgaggtgaccaagtcagaggatgcctggatctggataggctgattggcaaagcagtttgtatgagtttctgcattggttgagggtggccctatgaggttcatggaggctgtatcacccatcaatggaattgaagattcagcatagtcaacaattcttccttctactgtgatggcggaaccagaagaaactttctttgtaacttctccactagaaggagctgctcgcttattcacactaggaccaactgagctttgtagggaaatactatgctgtttgcggggagcctttgccatccttattttggatctgttttctttctccctctgctctctcctgacactcatgatctgccttttggatcttacttcaatgaagccatctgcatcaacagggacctcaatgccttgctgcttcacaacacggacagctccagcttgcaatgaggtagtatctccatcaggaacagcacccgttctagacttcttgttcccaccatgagatctctcataagggacattgtgtgtacctcggccccggccacgctgatcacttgctccatttatcctagatgccttgctcatatcaagttcccttctattagtatttctcgctggaatatctcttgttccattggagcttgttatctcatcttgttcaccatggcaaaatgattcagaagtttcattttgattcttctcgatgttttcccgaactctaaactcagttcgtcttacattcctacgagcccttctctggaatcctcctttggaatccttatgagaaggctcaacaattgagccagtagatctcatgttaatgtctttaacagcatatccatatctcctcccccttctatcagagacaacaccaagagcctttggatcacccatggctctcccctccaaaccatattgagaagattctacattgttggacgtaggtctgtaattcctcttcaaagagagaccttgattcctcccacttggagttgtaccctcagcaaactctctgtccacttgactactaaatccgtccacaccagccatctgattgtttgcaggagcattgagatactgggaatttgaattgtccatgccaaggggaaccttggttgtaggtgctgctgatttgttgataaaggtggatgagcttgcctgagctgggatgttctggtttgtacctccatccattagctcaggtagaacactggacacattctgattcaatgtatgttgagctgatatggaagaatgtgcagggcgggtggcctgagaaggcagcgatcgaacactcggagcgataggacgtacatacctcaactggccaaattgatacaaaggggttgttgaagggtgcatatgaggcagggatgggttaaactgattgtggagatggattggcatctgtatggaaccaatttgaatggctggaaccggagttggtattagaggaggacctgtaaacaaaccaaactggaggctgacaggtacttcattctgcccaactactgttgaagctgacgaaaaaataggacccacagaagatgcctgaggtaactgggaacttgaagcaggtgtccttgagctattggatggctccccattactgtcttctgtcaggccatttacaccatcaagagtcaatgcctgcagtgctttctctgcttcagtaacaggatcagaatggacaactgaaccactgacattctcttgctctgcaactcctgagtttagatgtactccaactgtcctttccgtgctcctcacagaagctaattcaagttgactattcggtggaatttcaacctgcacgccctcatcaaacccaagtataactggttccagttctacgggtgtatcctgcccctctaagaactcatcatccaagtctatgttctcctcgtccccttctttcatttcatcttcctggtagctatcattgtcttcatcatattcatcctgttttcgcctatcatcattgtttacacttgaccattcatcctcctccaagtggggcactcctgaggcagcaattctgcttgtattgtctgcatctacagtcagagctgcatgatggttgtcagagagcgccgtatgttcaccatcagcagaagtcggtaacacaggagaatcaccagatacgtccatctcatcatgtgaaacatgtggaggtgagctaggagggcttgaaacagaaagagaagattgtgaacccaatacagggctttttctgtccacaatttgttgctcattgacagaaatgtggtcagatcgtatcccatgctggcgagatgtctcttggtatacacttccgtactgaccctgcataatctgcacatcatctctaccagaacactctctgttcccaccatccacaaaagatgaattgaaacgttgtgctgaagcaccaattgaacttctgtgcacagaggtcacaattgggggtgggggaacacgtggttgcctcatagagtagcgtggtctggtaaaagaagacaattcattaacatcaggactctgaaacatcctatctccttgttgagcattgaggcttccatgagaactactaggcagccaagctgtatctccaaacctgtcgctgttaaaaaactcattatcaaattcagattgtttgctgaaacggtcaatctccctaggcgcatcccatcgtggaaccttttcatgatggaaatcttcaagtgcccatgaagaatcagttgttcggcctgttgaagattgcctaaccgaaaca

SEQ ID NO: 4994 - DNA, 2466 bp, Zea mays
tactgtacatgtgtcacccttgttttcttcccattacaatattgtgattagttactgcagaaggaatacagtagcagttatgtcaggactatgaattttgactcctttatagcaatatgggcaaaatgcaaaaatagtggttatgcacgctgactgctctgtttaactattcctattacctttttttactaaagtagataatacttatatttgtttaacattactgaaattatcttgtgtttcttatactttaggtgttgctactgcttttgctgctagagatgttcttggtaacattcttagtgggttctccttgcaattttctaagccattctcagttaacgactacataaaggtgccctcatatttttttggtgttttttatttgacacttgctgaaacgatggactagtaagttgtaaatttcattcatttcacttgcggacagtgtagaactatggataaaatactcaattcttgtttcgttatagatgttggtaacaataacaagatgatttgtaccgtgactcgcaagtactgtgagattctcaagcaattacttgtgtgatagtggagtaaaaagatgtgttgtaatttgtaaaggatgagaaaagaagcattgtgtgaaagggcctctagctgagtcggttaggtgatctgaatagcactctttaggtcctgggttcgcctccccttgggcctgaatttcaggccgaggttaagaaaagtcactagctggttcctttggtcggcatgggtgaactgacctatggtggacgccccggggggtatatggggttggttgtgtgggttgagcgtcaaagcacgggtcaaggcccaaaccatagtgggtggcatccccatgtatgaggggaccaactttcgtggcttttctcggacgggctccggtggagctcttagtgaaataccgtgggggtggtctttcccccaccagtcgagtttttttagaaagggaggaatgttactaatcactagaaggatatcctgatttcaggacaaaacactgctcattgctagcatgtgctcgtcttaaacagatgtactttgcttggaggattatgtaaactgcaattcagttcttattgtgataaagcacagtagtaagcatccaaactgaaaattcaaaaggatgtctcacctaatggatgcccactgatggttattaagtggttttataagaagagaacatagatgtggggaactgttcaaatagctatgagtatacaggatgccatatgcttttcataaattgctagtttggttaatgcttctcatgtatttatgctttgagtacatgttagtctatgtgcacgagaaatttcaagaaacaccatccttccctcttgtgtttgcaaacaataataaatggtcaatttggactggtgatacttatcttacatccctttttagattcttactatgttctatagttgtagtcccgcgccattctcagttaacgactacataaaggcggggtcaatagaaggcaaggtggttgaaataggactcacttctacttcattgatcaatccagaaaagctccctgtcatagtacccaactctttgttctccagtcagatgatagttaacagatcacgagctaattggcgagctagtgtgacaaagattcctattcgaattgaggatattgagaaggttccttctgcatcagaggagataaagactatgttaaggtctaatcaaaatgtgtcctttgatagtgatgttccttactgctatctctcgagattggaaagttcatatggagagctcaccattggatgcaacctaaaaaacatgagaaaagatgagtggctatctgcccaacaagaaattcttttgggagctgctaggattatcaaatcacatggcattgaactgggaagcaccatgcagtgctgttaattcacgcttccggcacttttaagtagggtaaataccgttagcctgcagaagtgcagaacttcatacagacgctacctagccgttttgttcttcaacgttttatgtcttcagaccatggacacccactaccaatactattctgttactgccgttttctttggaactaaggtctagtttccttttgtggtcgtcccttttggttggtgcttggatccgtttctgggagcttctttgtctatgtatactggtgaacgtttgcgccgcgcccacgcctgccctgtggatgagccctgagcgttttattggtcaattctgtgaaatattgggttttatcctcgaaattctagtgttttacgtagtactcgattaactagactaataggtgaccatcttgaagcaattcgtgtttgacactgaacattcctgaggacttggacttgcatgccccaggatagattccaccgctgttttaccatgctgaacgtaagagtactgacaggctgccatgatcagcatgtttctacaaaaaaaaaaaaaaaa

SEQ ID NO: 4995 - DNA, 6126 bp, Zea mays
  misc_feature (4815)..(4815): n is a, c, g, or t
  misc_feature (5886)..(5886): n is a, c, g, or t
ggctaacctccttttttctctctctatctttctctccatctgtggacttctccggttttgtttgacgagatgcctgcgctcgccgtcgacgccgcgacacccgtggcgcacgccttcgcgtcctgcgacgcggcgcgcttccccgccccgcccgtggtgggccccgccgccgcggccgaggccgccccctggtcggccgacctctccgcggcgctctacaacgtggacggctggggcgcgccctacttcttcgtcaacgacgacggcgacgtggccgtgcgcccgcacggcgccgcgactctcccgggccaggagatcgacctggccaaggtcgtggccaaggccgcgggcccgcgcgccggaggcgggctcggcctgccgctgccgctgctcgtgcgcttccccgacgtcctgcgccaccgcgtcgagacgctcaacgccgccttcggctacgccgtccgctccaccggctacggctcaaggtaccagggcgtgtacccggtctggggcccccggggccggcccggccgcggggccattgtggagttcggcgcgccctttgggttcggcctcgaggccggctccaagcccgagctgctgctcgccatgagctgcctcgccgcgcgcggcggcctggacgccctgctcatctgcaacgggtacaaggacgacggctacgtctcgctcgcgctcatggcgcgctccatgggcctcaacaccgtcatcgtgctcgagcaggaggaggagctcgacattgtcgtcgaggccagccgccgcctcggcgtgcgccccgtcgtcggcatgcgcgccaagctgcgcaccaagcacgccggccacttcggctccacgtccggggagaagggcaagttcggcctcagcgccgcgcagatactgtccgtggtcaccaagctcaaggccatcggtatgctcgactgcctccagctgctgcacttccacatcggctcccagatcccgaccaccgccctgctctccgacggcgtcggcgaggccgcgcagatctactgcgagctcgcccgcctcggcgcggacatgcgcgtcatcgacgtcggcggcggcctcggcattgactacgacgggacccactcggcgcagaccgacatgtcggtggcgtacagcctggaggagtacgcgggcgccgtggtggccgccgtgggccgcgtgtgtgaccgcaagggggtgcagcaccccatcatctgcagcgagagcggccgcgcgctggtgtcgcaccactcggtcctggtgttcgaggccttctcggctacggcgccgggacgcctggacgcggccacggcctacctcctcgacgagctcacggacgactgccgcgccgactaccgcaacgtgatggccgccgccgtgcgcggcgactacgacacgtgcggcctgtacgccgaccagctgaagcggcggtccgcggagcagttcaaggagggggtccttggcctggagcacctcgccgcggtggacgccttctgcgagctcgtcgcccgcggcatgggcgcgcccgagccgccgcgcacctaccacatcaacctgtccgtgttcacctccctgccggacatgtgggccatcgggcagcagttccccatcatcccgatccagcggctgcaggagcggcccgccgtcgacggcgtgctctcggacctcacctgcgacagcgacggcaaggtgagcgagttcatcggcgggaggcacagcctgccgctgcacgagctgcccacccacgccactcgcggctactacctgggcatgttcctcgggggcgcctaccaggaggccctcggcgggctgcacaaccttttcggcgggcccagcgtggtgcgcgtgtcccagtgcgacgggccccactgcttcgccgtgacgcgcgccgccgcgggcccgtcctgcgccgacgtgctccgcgcgatgcagcacgagcccgaggtgatgtacgaggtgctgaagcagaggaccgacggcgccacggccgccgccctcgcccgggccttcggcgcaatgccgtacctggtgttcgaccccgaggccgccgtgatgtccggcggcgagagcagcgactcggagcggtcggccgccggcgccgccgaggaggaagacgatgaggagtgggagttcatgcgcgggctcaccgtctgatgacgtgcccgcccgcccgccccgggtgaaacaaggcgagtccgtcgccaggaagttgtcagtggccggccggcgttggtttacataataacccccaccgcccggtgttgtatcgtgtcgtggtcgtagtcgtcgggtgtctcgtcgtcgccggagttgtttggcgccacctttttattccgaacgcgtcagtgtccactgttcgcctttccttttttttctctctctttcatgggaataatctgaaggaaactaatagcaagtttctctttaactggaaatttcgttttttcaagaattcattctgtctgttgctgtgtcggttccgcgcccccgttgcgtggtgcgctgccaccggagaacaccttcctctcgtctcgacgtcgtcgctttctcttttcttctccatcgtcgcgtcgtgggcagggggcaggtgtcacggccccgagcgccggaatctctctggataaaccccgagatattcggacgtcacgcgggtgggccgcggcggatttgaaacgcagctctgggacgctacctgacgcgcgtgtcagcgtcatcggagcggtaggtgtggggacgctggcgggctgggctttgcttccttccttgctgtgcgtgctcgactgcgtctgcctttgccgcatgtgttgcgagatgacgaggacgaaaaggtcttccagaatttatgagcagtttttggatttggtacagatgctgtgagctcgagctggagcaccgagaccggggctgcctgcgacgcggtaggtgagcgccgcccgggagtcggttatactacgactttcgccgcatacattcagccgccggccgccgcatacggcatggattagattattagataaagatcggatgagtaataagcagtgcaaagttcatgaacctgaaatatgcatgcatacacctgctggcgatctcggccgttgacggagcatgcatgtggtgtgtccccgttccggatggctcgcacagatctactgtctactactagctcccagagcagagcaggcagagatggttggcggttggcacaggtagagaggcagccacgcagtgcagagccgtggtagcgatgcgcgaggcggatggacaggatagggaggggatagcgtaggggccaagtgaccactcgtcggctctggcctttcggcgcccatctcctcctcatctcatctccctccacggtccacttgtttcgttcgctgtgtgacagtagtgtgagagattccagatccaacacctgccgaccccgtcgtgatcctgtccagcggctccagagacagagaggcacgaacacatgccaagctcccagctcctcccctcccccctcacctcacctcaggccctcactcccccaggtactcaatgctctttctctctttcagccgccgctgctgcgttgcgtcgtgtgggagctgagctagtggcactgggtgctctcgaccgcactaggcagaccagacgttgcgtcgtgccccatattcgccgtcgccgtgcctttcagcatctatctgggagtgaatgacttgggctgggtgacggatagctgaccatctcagctctctcgaagaacaagatcgtaggagaacctcctagtcctttgcccctgtcgacactttatatgctggtgtggtgtccatcctgtcgctgctgggggtgccaattgccatgcccattgtttgttcggtcccgttcaccggggatcggatcggatcgtctgtccagcagcactaccagttcggttcagatgcaatggaatggaatggaatgcaccaccgcgcgttgacgctggtcgaataaggaggctaatgctgcctcgtctaattcagcggttacggcagaaggtaccagttgccaaaggtcggtagaataagtacccaccatctggatccacccctccaaacttcagtgctcttataagagacctaaaacactttatcttcgtctacactctagagctctcaacgatttcaaacactttatatcaattttaagctataaatccaacatgagatgggctaactttagactatttatgtaaagctttagctgtatagtttagagctaaaatgtagagggggaaaacataaacaagctagccttaaaaattaaacttgaacgattattgaatctgggagatgtgtatatctcgattccaatagaagaaaaggatcagaaaaaaaatgcaccgactagacctggttaaagtgatctcgtgttcaaattaaaacaagtacgtgtatatttctagcagtacaagtgctcgtgtaaggctgcttgccaccaactctactaccatcgtgttgcagagatggtggttcgttcgtccttaaagaagaagaagattggcttcattcggacgtaaccacaaatcttttcattctttcttttcactgtatcttttctcatcccaacgccatctttcccggccacggcgaacctcgagttcttgcatggtctctaggttgatggtatagggcagggcacgcacgtgtgtgcttaacctgctgtcatttttgtttagcaaaaaactagtagcacagcatgtcagcatcgttatccggggacctctcatgcttataggagaacaatgtcgtgcttctttcctccacaaataaagaggagaactctacttcgcagttncggcgtcagacatctcaactcttgcaacgtacgtttccttgccgcccgggcaagtccgagtccgtacaaggaaccggtcgtcgagtcgagtggggcatctgaaaaagctcagcatccggtccggtccggtccagtccaagtgtcccactccccgcctgcagctcgacgaacggaggtgacacgaacccaacctgggatggggggggggggggggggggggtagagagatcagtacgtttccggacagagctggaacggttggtgcgccgtgcgcagttcttgctgacgatagtttagaaacgtttcggttggtgcgcgcagttcttgcggcgcctgccatgtctgaacctggacaccgctacgtctagctccgggacaggagacgagcgctttgaccggttctgattgtacacgagtccggagaagtgatcgggattcggggacagttgtgaagcttcgcaggctttgactaccgccacacacgtgtgtgtgtgtgcttgtttactagaaagatggcttggtttggtagcaatagcgacggcgaatttgagataatgacatctgctgctgtctgctaagaaagactggtcagtgactctgaataaaagaacctgcatacatgcagctagatataaaagaaaagaaacgttgaagcgtcgcatacctacttgtgcttgcgttacctacctttacccctgttggctgttggaaggctgaaacgggagatcgagctatattattattagtgccgtctcttgcgctgatgcactcctcctccgtcaggcaggagctgatctagccgcgtatttgtatttggacgaagtgcttgtctagatacgtaagtagctctaaacgaatgatcttgtttcagaacgtacgggacgagcagtgtagtattctctaacctggaaggaggagtgcaagcggatggaaaagaatagtttaacctggaaggagtgtattctctaaccaaaccaacggaaggacggcttgagtgaatgaattctgatcactctgtactatctgcttccctttccagtcagaaagaaggcaacatgggtgggccaaacnggccaccgtccaccctaagatttggcccaaagtttaagaacactacatatctttggcgtggaacctcagcaattagccgtacatcttcgacaacccgccgcgctgtttctccaacccgtcatcgaggcccatcgctaagcccagcacccagcctgcaattctctccaccttttaacacggtgtttggtccgggcctattttggtctataaccattcccgccacacttcaacaccatgttt

SEQ ID NO: 4996 - DNA, 2426 bp, Zea mays
tgtctgtcagtagtgttaggtgagaccaaactgtcgtcgtaatatttttccagcagtttaatggatggcccgtttcctctctcgtgtttcttcacaatgtgattccttcgataacactgtcattgccatcctgtaaagtactgaacagtttctattttagccaggacagctactgttgatgtggatttataaccgatgacttctcctaaatttctcatcttaataccgagcatgcaaaatcctgagcatttgtgagcactgaacatggcttattgctccagttacttgtacatcgtctaaagtttacgccggcctggcctgcacagatggacggcaaaacaataaaggctcagatctgggacacagctgggcaggaaaggtaccgtgcaattacaagtgcttactaccgtggagccgtgggagcactgcttgtgtacgacatcacaaagaggcagagcttcgacaatgttcacaggtggcttcgtgaactccgcgaccatgctgactccagtattgtgatcatgatggtcggtaacaaatctgacctaatccacctgagagctatctctgaggatgaaggcaaagcgttggctgagaaggaggggttgttcttcctcgagacatcagctatggaggctataaacgtggagcaagccttccagactatcatgacggaggtctatggcattgtcaacaggaaagcgctggctgccaaagaagcagcagctgcaactgcttcgttgccctcccagggtaaaattatcagcattgacagcactgcaggaaacacaaagagggcatgctgctctacctaaaaatgttcaaacaccacattatacagaaccttggagacaattgttggtagaaaatggagcatagtgatcacaaatgatgtggtggcaatatctactcttattctattctattctattcttttcttttctttattgtgtggacaaaatgggggtacatgcagtttagtttgttcagtgtgtgttagtcaaaagttagatattttcgttaggatccataccatttatcttctcaagttaaatgatactgcagtataactcagaatcatatagtcccaagttgctacagaattcaactgcgaatttgtgatttcatcatgcttacattctaaaaaaaaaaaaaaaaatattaagatatctttgtgcagcctactctgacaggagtttgttgcatgctggtacctaagccactcttgttccataactacagtaggtgttggaaccattgaataattagtttgtgaacagtttccatgactatattgggcagactgggcatgcctttgccctagtaaaattggtcctagtgctcgtggtattggtgtttgtcgtagcaaatggcagtattgctccctgtctagccgtcgttgccacccatgggccatggtgatgatgttcctattgcctgtagcgacgtgagtacatgccaatgacgtgtctcgactctggatggtaccggtggtgccctgtaatgtcttctgcggatgcgtggcactctgacttaaattctaggggccgatcgattgctcggatcagccttctcctttcccttgcagcttgaggccacattgaccatgttgattgggaatggattcctggcgatttccatcgggttttcgccaaaaatgagttgtccttgcttaatggtatattgtatctgttaccggagtaccttgcaaattttggtgttgtgggtgggtaaagttgtaccacttgcagtacttcctttcaactcttcagttgatggaatttggtgatcggctggcagcttgctagtttgataacactatttttttcaagggatttttatttttttaaagagaaaatgaactaattttctttggaaaaataaaaatcccttggaaaaaaatggtattgccaaaccagtccttaaagagtagatcgaaaatctgctcgaccttgattaggtcaaagttgaaacctatgggtgtctcgggcgccttgatccatgggcacgagatgtggtttgccacttggccctagtcaacaattgcgacttcggctgtgtcagctgagtcatcactttcttgttggacgtggataagagcctttctcccgaaggttgaagatggcaagtttatggttctattattcgtcatggtgttgtgcctaagagccatagctaccacaagaccctagaataatatagttaatcatagccactggttgatacgggcaaatcatatgtttgaagtacacaagaacgaagcaatgtcaaacaaaccttaaggctagcgtaggccatgcactcgctaggtcacctttgccaagactagttagccaatgcccaagcatcgaagaatgctgaagtttaccattagctctgtcaccacctttatttctagtgtttggaacatattccaaaggctcatg

SEQ ID NO: 4997 - DNA, 4254 bp, Zea mays
gcacgagaccattacctagaacatcctaaatcaaaaattcttcatcaagttattttcttgctccacggattgcctgctctgatgatctggtccttggcaagatcacactcgtgttcataaactcaccaactcactgacacccccgtactctttcttcttcacccacggccaagatagaactcactggcatgctaggcttcctctttttaattcaccaactccctcctccggcgcatccgcatccgaatctcaatccccacgggcacgaatctgacgctgcgaaaacctttccgccatgaagcaggaggggcggaggcggcaacaccaacaccaacaccacaggccgccgccgcgcctcgagctggctatggcgcacgcgcggggcggcgggggccacggccacggccacgaggaggaagcggaggcggccgtctgcctggacggcgactccgaggcgggcgaagcgcgcagcgcggggcgcgcgccgccgtggcgggaccagctgacggcgcgcgggatggtggcgagcctcgccgtcggcgccatgtacagcgtcatcgtcatgaagctgggcctcaccacagggctcgtccccacgctcaacgtctccgccgcgctcatcgccttcgtcatcctccgcgggtggacgcaggcgctcgcccgcttcggcgtcgctacgcgcccgttcacccgccaggagaacaccgtcgtccagacatgcgccgtcgcctgctacagcatcgccgtcggaggtgggtttggctccttcttgcttgctctgaacaagaggacctacgagatggctggggaggacacggaaggcaaccttccgggaagctacaaggagcctggcattggctggatgaccggcttcctcttcgccgtaagcttcgtcgggattgttgcgctaatacctctaaggaagatttttcttcgatttcagtctaacatatgttggcgctgggatgatttgctctcacctcgttaatctatctctccttcttggtgcacttctctcatggggaataatgtggccactggtcagtgatttgaaaggggattggtatcctgcagatatgccagaaagcagcatgagaagccaaggttacaaggccttcatctgcatagcgctcctcttgggcgatggtctttacaattttgttaaggttgttgcattcactgttaagagtctacttggcagatcaagactgaagaatgcaaagaaagaggaagacattccagtgcttgatgaaattcagcgcaatgagatttttacaagagacagtatccccacatggctagcctactctggatatcttgcactatcagctgttgctgtgtttgccattcccttgatgttccatgagatgaaatggtactatgttattatagcatacttattggccccggcattgggtttctgcaatgcctatggtgctggccttactgatatcaacatggcctacaattatggaaaggtcgcgctctttattcttgcggcctgggctgggaaggactctggtgttgtagctggcctagtgggttgtggtttggtgaaatcactggtgtcaatatccgctgatctgatgcatgacttcaagactggacatcttacattaacatcacctagatcaatgattattgctcaggctattggcactgccatgggctgtgtcattggaccactgacatttttactgttctacaaggcttttgacattggaaaccctgatgggtactggaaggcaccatatgctctaatctaccgcaatatggcaattcttggtgtccagggcttctctgctctgcccctgcattgtttgcagctgtgctacggattctttggatttgcagtggcagccaatctgatgagggacctcttgccaccaaagtacggcaaatgggttccattaccaatggcaatgggggttcccttcctagttggtgcgagctttgccatcgacatgtgtgtggggagcttgatggtcttcatctggcacatcattgacagaagtaaagcatctttaatggtgccagcagttgcatctgggttgatatgtggcgatgggctttggatcttccctgaatccttgcttgccttggccaagatcagtccaccattgtgcatggcattcaggtcttcacactagagtaacaaaatgctcgacatctgagaacagttccatgtccaatcggagaagctgttggcatgccaagtttgtcattaattagctgggatatgatacatgcaggtaggtaaagatgcagtgcctatctggatgttacctacatataatgacgtaatgtggtacccctgtaaaatttatcatatgcaagatgatacatcacattagagcaatggtaagtttgagaatttcaccccagtggtaatggatggatgcaagagctagcagtagccaaaattttgcaccataggttgtacccccacccctatagtttaatatggaaccacaagctacagtatacaaaccatcttccaaagacagctgaccctattgtcaatcacagctggttttggtaaaagaaaaatgcagtcaaatcttgcatgaatggttagcaaatcatgtatatatttatgtatgtctttgccataacttggattcacaagatgcaatgtagtaagaggcatcttggtcaggcatctgatacaattgtaaaatcatctgctgcgtccttttatcataaacaaaatcatcaggtgatgtatgcctatgaatagttagcaaaaggtacatatatggttatgtatattaaacacgttctgtgaagaagaaatgtaaccattcaacaagaacaatccaatgacacatttgtcagcatccggagaaggctatatcctcagatgcttgccttttcaaaaacctcgatagaagaaattaatagaggcctcgctattgtcagatacatattctcagggcctacattcccaggggcggacgtacataagcctgagtgagggcccaaccgccccactcatttctctgttgcaaatagatttctctgttgcagatagtgagcttagatttttactatacggtttcctaatcaacctaacttaaataccacagctctgatattttagtgctcgttcttttaaatataccctcacttatattttgttttggatctgtccctgtacatttctgaggacctaccttggctctagctaaggtagaggtcattagaccgaaggtctaaatcttttagagccttaaggacatgtaaggttgtctcaactattgtcgtttgtacaggactgctatatcataggctccaatgacccataaggttgtctcaattattgcagtccataagaacggccaaaatttgaggccattattccattcaaaataaggtggtgcatcatgggttatcaaatttggtgggatgatactattcctaatattagtattaactaattaactatgagaaataagatggtgatggatcaactcattccatttcacaaacaagtaaaaaaagtgagcagtaagaagataatagactagttcatttctcaaaccaaacatcctatatatacttactttggacgttcctaaacttagaactctctcggatgtctagggcttctagggctctgtacgagctcccaaatctttgaacccccggcctatgagttattacgaatgattcggtcctgaaaccctcctggactcgacgcctcatgaggacaataaagttttcaattcggtatgggagcacatgtaaagtaaagaatatagatgacctctatccctagagtaggacgcatcctaaaggtataacactatgttcaaacccaacccgtcaacctcgtggtagtggttatcttgataaggctcatttctatcatgtttaatatgatgggcaatgttatggttaaataggtgtattgttgccccgatataggtagcaggcatacgcaagaccactatttgatatgtgtcatcgtccgtatagccatgcttgaacgcgtcagggtactgtaaagtattataaagtatagatgactatattgattatcaattacgtcgtatccaatgacgtggatcggtcacacctgcctctaccgcaaaagggcccctagatgagttgattagatagtctgaatagcactcctaagattctaagttcgacttcccttagatcggtctcggtcttggtcccgattattctcatatgtgatatagtgtcgctatgtatgggtgggacacaggtttaaggggtattatc

SEQ ID NO: 4998 - DNA, 2540 bp, Zea mays
  misc_feature (8)..(8): n is a, c, g, or t
  misc_feature (10)..(13): n is a, c, g, or t
  misc_feature (2511)..(2511): n is a, c, g, or t
ggccgggnannnnttaccatgggtaccctcgggccggccggaagggcccaaggcttctctatctagggattcatcttcctctcgtcttccctcttcctctccgaggatacaaggcgccgtcccaggtagaggtagggtcgccaccatgctggaggagctgctcatcttcacccggggcggcctcatcctgtggtcgtcctgccgggcgctcggcgccgcagccctcaagggctcccccatcgacgccctcatccgctcctgtctcctcgaggagcgatccgccgacgccagcttctcccaggacaattacgccctcaagtggaccttccacaacgacctcggccttgtcttcgtcgccgtataccagaagatactccacctcctctacgtcgacgatctcctcgccgccgtccgcaaggagttctcccagatctacgaccccaagcgcacctcctacgatgactttggggacatcttccgccagctccaccgcgaggccgaggcgcgcgccgaggaaatgaagaagtccaagcaggccctctcgtcccgtccgcagcctgctctcacccagaagaagcctggtcccaagggccgcggcggtgattcccgcggcggcgctgctaacaagggcggctctggtgccaaggatgactctgatggcgacggctatggcaaccaggaccaccgtactctggcaaatggtgccttcaagggccaagagaatggcgtccgcaaggagaattcttctcatggccgcactgttgttgtcaagggaaaggagaatggggcccccaaggatgaaggggccttcgatgtaagtaaactacagaagctacgggccaacaagaagaatggtgccactgacaatggaaccaagaagctgaccaaacctgacataaagaagaaagggaagcaagatagggtgtgggacgacaaaccttccaacaagaagctggattttacagacccggcagacgagagaggggacgaggtgacagacaatgtggcggtcatcgagggagaaagcatgatggataaggatgaggatctgagcagcgacagcgaggacgaagaggtggaagatggacccaaaaagaaaggatggttctcatcaatgttccagagtatttctggtaacaatgtattggagaagtctgatctgcagcctgcgctcaaagctctcaaagataggctgatggcaaagaacgtggcagaggaaattgcagagaagctttgtgaatctgtcgcagctagccttgagggcaagaagctaggatctttcactagaatatcatcaacagtccagacagctatggaggatgcgcttcttcgtattttgaccccaaggcgctctattgacatactgagggatgtgcacgctgccaaggagcgtgggaggccatatgtcattgtttttgttggggtgaatggagttggcaaatccaccaatcttgcaaaggttgcttattggcttcttcagcataacctcagtgttacacttgcagcatgtgacaccttcagatctggtgctgttgagcagctgagaactcatgcaaggaggcttcagatacctatatttgagaagggttatgagaaagatccggcagttgtagcgagggaggctattcaggaagcaacccggaacaaatcagatgttgttctggttgacactgctggacgtatgcaggacaacgagccactcatgagggcactctccaagctaatcaatctcaatagcccagacctggttttatttgttggagaagcattggttggaaatgatgctgtggatcagctcactaaatttaaccagaaattagcagacctatctgctgttcccactgctagattgatcgatggtatcctgctcaccaagtttgacaccatcgacgacaaggttggagcagcgctttccatggtctacatatctggagctccagtcatgttcgttggctgtggtcagtcctacacggacctgaagaagctgaacgtgaaatccattgtgaagaccctcctgaagtgattgcaccaccgtgttgaagtgcagtctgcccaaagtctgttatctattgtatccccagtgacctttgtcatcctcatgttggacgtcgtcgtggatttgtaactgtcggagttgcaacaaaacttgtgtgcttgcgtcaacgtgtgccgtcttgctctaataatgcactatctgcattttgaatgggtaaaaaatggatgaatatgcgagtttgctatcatctggatgttaccagattctcgcgcctgcccccgtgcatgcaagcgaaaccagtcacgagctcacttcatgtcttgatgtgttggcaagctggaagctgcatggatgtctgacatgatttcattcagcgtacacggttgcttgcaacattagtaatgagtagcgtgttgtcttgtggtgttcatacgtaagggttctgatccccttgtgtgcaagtctcacacatacaaaaacctgatacatacgcgtcccggaaacatgtgcccttncgtattcaggcttcttattttttttaaaa

SEQ ID NO: 4999 - DNA, 1096 bp, Zea mays
ccctgggcatgcttttacgcagcattaactcctcgtctgcaaccacgatgctactcaatttcatcaactccaaataggctccctccacaattcatgtaacatgtgcattagtttatgggccttcaccaacagggaaggatccaccaaggagtttgatcaacatcctctcggcgtccgcaattcctctggaatatagcgaagaatgcagctgggctcccatatttgtgaggcagtcaaatttcaagttacctgctgacccatccactccgattatcatgattggtcctgggacagggctggctccttttagaggtttcttgcaggaaaggttagcactgaaacaatctggagcagaactgggcacttcaatccttttctttggatgcaggaaccgtaatatggactacatatatgaagatgagctgcaaactttccttgaggagggggcgctttctgagctaattgttgcattctctcgggaagggccaacgaaagaatatgtgcagcataagatggtggagaaggccacagaaatttggaacatcatctcacatggtggttacttatatgtatgcggtgatgccaagggaatggctagagacgtacacaggatgcttcatacagtagtccaagagcagggatctttggatagctccaaaaccgagagctacgtaaagagcctgcagatggaaggcaggtacctccgtgatgtatggtgacacatcacccccattcagccatagctctagcgtgtggaagtaaagctggctttgcgtgtacgacatgcctaatgccaaatgaagcgtgccattgattagaaactgaaatgttcagtcgatcagtgtaattctttgacatctaactatttatcattatatggaatgggaggaactgttgtagatttgtagaactacaaaaaaactgtgtatccctaacaagtttgtagcaaagggggtacattattacagtttgagatgaggacatcatgtatactgtttgagacgaggacattatgtatatacttggtacattagaaggccaccgaaaacaaattttgcatctggtttttgaaagcatgtgctcctatcggccccta

SEQ ID NO: 5000 - DNA, 4618 bp, Zea mays
ctttctcccctcttcgcccccccgctgccgcgcccacgcccacgcgcaatcagaactgccggccagctccacctccaccccccgaacggctataattaggcggttgccggaatcccctctgtctcgcaccgcagcaattccccggccccttcgcaccgtttccctctgcgctcccaccccccgcccccccgaaatcaccgccgcgccccgcgtctcgcccacgctcacaaggaaaggaggggaggagaccggggcccagacgccaacgcgcggacccctcgagtagggcgaggtccgggctccgctcccggtttccggggagagtgcggaggacccccatcgtgcgcgccattgaactctgctcccggctgctcgccggggagagggcggaggacccgatcgtgccgtctcaacccgctccgcacccgcgcggccgcgggcgtggtgctcccgcgccttccgggcgcctcctgcttctccgtgcgccctcggctccatggaggccggctactgcaaccgcaagaagaccgacggcatctgcgagtcagtctgcgacagcgaggtgaggcaccgctccggctccagccagacagatctgtccctttccctaccgctccgccgcgtgtaacgcctctgcggatcgcctggtccgccggggggagacgcggacgcggtcgtcgcggtgcttgtcttttcctcttccacgctgcttaaacgcgttttgctccacgctgagctgcttgcttgcttcgaccttttcaccgctccagttgcgcggcgtgttcgcggcggctgctattttgccgatctcagcagggttgctgtcttggatcgggtgctcgtgagatttccacagcctgggatcgcatatgctcgcttaattgcgtccgcggcaggcatcttccacctgccgcgggtgctgtggattaggtggtgctaaacaaactggggcgcctggatgcttccggctgcgctagaatctctccacctgtatggatcgggtcgtctgcctaataccggaatgaatctgtctctccacctgtaaaagtttccagcttttttttttgaacaatccccgattggttcccgtgccgtagatggtgagggttcatgccgcaaaagtaattttacaggctgtttccttcctttatatgatacacaaataaaattagctgatgattgctttcctctgttggtggatccgcaccagcctatcactgataggtttttggtcggcgacgccgaaaatgcgcatattccaccagaccaccgcttacttctttaatctactgcacatgcattgttttgatggcctttaacacagctgcacactcacggcgcggcggatattttagaagctcgtgttctcaacataggagtttgtgatggctgtgatgttccctatgttcagccgttggattcatggtgctatgtcgtgtccagccagctttgtgcttgaataaataaatgctcatacgctcatgtagccagtatttgccgttctcatgtttagtaaattaaggcatgttccttctttttgtgtagcatttgtttcggcaaaactcaatgatgcctctgtctacaatgcactaggtttcagtgttttttaacctctggttgagttagtgctgcaaaagtgatctcctgactcttgactttggaatgatcagcactgtttcagagtacagttcattgtatctgtcacatgttgtagctttccagtttacttctagtttaatttatgccttgttatgatgtgtattggtgcatgtctgatttcttatttgctccctgatactgtctgcagtttggctcgaagtcagtcctgagcatgtcaaggctgaagtgcgcactgcggggatttgatctgagggttctcttgatcctactgattggtgtgccaattttgatctttgccatatatgtgcatggccagaaggtgacttacttcctccgaccaatctgggagaagcccccaaagcccttcacaatactccctcactattaccatgaaaatgtctcgatgggtaacctatgcaagttgcatggatggaaagtcagggagactccacgccgtgtctttgatgccgtgctcttcagcaatgagcttgacatccttgatatccgctggcacgagcttagcccgtatgtgtcagaatttgtgctgcttgagtccaattcaacttttaccggcataaagaaggaccttcacttcaaggaaaaccgccaacggtttggctttgcagagtcacggttgacctatggcatgataggtggaaggtttgtgaagggagagaacccatttgtcgaggagtcgtatcaaagggttgctctcgaccagctcattaagattgcgggcatcacggatgacgacctgctgatcatgtctgatgttgatgagatcccaagtggacacaccatcgacctcttgagatggtgcgatgacgttccggagatactccatctccagctcaggaactacctctactcgttccagttcctactcgacgacaagagctggagggcttcagtgcacagatacagagctgggaagacgaggtatgcacatttccggcagacggacgacctcctagctgattcagggtggcactgcagcttctgcttccgctacataaacgacttcatcttcaagatgaaagcctacagccacgtcgaccggatcagattcaagtacttcctgaacccgaagaggattcagcatgtgatttgcgaaggggctgaccttttcgacatgcttcccgaagagtacacgttccaagagatcatcgccaagctggggcctatcccgagtacattctccgccgttcatctccctgcctacctgctggagcaattcgatcggtacaggtaccttctcccaggcaactgcgttagagagagtggctaggcagctggctgcccgccgtctgcatcatgaccctgaggcgcacggacgtcgctcgcggatgtctgtcttatggtggcgtgggggttgtgtccgatacgattggctgacttagttgagtgatcgcttggctgctggttgagttcatatgggatttttgtgtaccgtgtaacagaaaccatggaaggcctgacggctgcgtagcgcagcgcgtgcttgatcgctgctgcgttcttgtttggcagaggagagctgagagctttttgttcgttgcttccatgattgatatatgatgaactcagaacctgttgtagatctcataccgacgagcgacattcagattctttctttctttgctcgtgatgtacattgccgttcacttacctagttacgttgagccatagatgtttccaatccagtttctgactgtttctcatacctgttgaccataaaataattttccgggatgccatctgtttgctctattactcgaagcgccgaggtggaaacgattcttactgacgtctcgccattggtaaaagcaggctggttgatctccaggcggggggtaaaaaaaggtgctctttttatggtcgttggtggttggtaagatctgaattgaggggtttctgcgtttgcgaaggattcgtttgttgattgcctgagcaagggcgagcaacccgtgatgagaggcggggcatgtgtggggccttgcctggctggatggagctgagctggtgcgaacaggctgttgctgtcgtgcgtgcacagtccacttcagccagattggcgaacatgctgcgaattggctggtcgtatggctcgtagcgtcttgctgatgctgcctcgctgtgccctgttcctgcactgcacgcccatcaacagtttcagacgagcctttagggcttgctcgttctactgtgtcaattcatgtggattggggtgtattgagtcggctgccatctttttggtgcgctggtcggagccgagctagtcgtagttgcagttgctggcgccgtcatccgcagatttttccagcctaccagggatgtactggtgggcggcatggccaggccagggatgggcatcgaccgcttcgtttgtctctggtccttcctgcccggggcaaacgcgcgtacggcgtccctgtccccgctagctgccggcttcgccgcccgtatcgccgtgtccgttggaatctcgctcgtcgccacagatagatagcgcttggtttggtttgactcgtccgcacgtcgcggccacgcccggtcgtcatgcaccaggaaaatgtctccgttgctaccgcttccaagctgcaaaaacaaaagctccagccaacagcgtcccattccatgcagtcgtactaccgcgaccactgttgttgagttgattgcagcgcccacccgtggccgtgggtgggtttgccatgacagctaccaccagtggtatttcgtcattatgtggccgctcttatttggccggttctgccctagtacaaaagtgtttccgtgcatctcgaggaccggaatggacgtgtaggggagtgaaaacgggactaacaacacggatggacaataagtcatcctttatcccaatcctaatatatttctaaccaaattcgagctgagatacacatagttcgaaacagggacatatatggatacatggaccatatatttattcagatagataagtgacagatacatatattat

SEQ ID NO: 5001 - DNA, 1113 bp, Zea mays
caagaactgaaactacattgtttggagatagttcatcggaaatccttgatgagcctcagatggtgatgtctgctgaacctttccatgcacctgcttatttgaaccgttgggcttagaattatggatattgctagcactgaagctggaaacattgattcatatagcatcttcacacctacatgccatgcatcttttgcctcctcaaagaacaaagtgatgaaaaggctacattctgctggaaaaatgggagaacagtatgatccatgcactgagaagcattcaactgtatacttcaatctagctgaggttcagaaggcacttcatgttaatacagtcattggaaaatcaaaatgggagacttgcagtgaagctgttaatactcattggggggattgcgaaagatctgtgctgcatatctatcatgaacttatacagtatggcctccgtatatgggtgttcagtggagatacagatgcagtgattccagtgacttcaactagatacagcatcgatgctctcaagcttccaacaataactccatggcatgcttggtacgacgatgacggtgaggtcggtggatggacccaagggtacaggggactcaattttgtgaccgtgaggggagcaggtcacgaagtccctcttcatcgacccaaacaggccctcacgctaatcaaatcgttcttgactgggagcccaatgcctgtgcaatccagcacacacagcaacatgtaatccgtgttgttgcaactgattcacgagatgaatgaacatcccgaagcacccaagtcagccagttgtccaacccggcttgttctgcaacttgctgtagttgtttatgtatcagagctaccggtgccggttaccgcagcaaccgtgcttttgtcggccctgttggtgcttgttgcagtaccagttatcccctaaggcaggggacagaaactgcggaatagtttttgtttgcattgacgtgacagcactgtaatcttaaacatcgtaccatagtcctttctatgacaaaggtgtggtttctgatgtctgcaataaatgatctggacttggggggtcaaaatgaaatacttctggggtacagtaaaaaaaaaaaaagcggcc

SEQ ID NO: 5002 - DNA, 2611 bp, Zea mays
taggtcagcaagctgcattcctgtatatagctttgttttatgatactgatgtcctgatactgaataatttcttgtgtatttggatgagtaattgaacagtaggaaatggcacaggaatgggacgtacttctgacacaccaacgccacacgttcagtggttaactgacgtagctttatttgcatgtagctggcgcaacaagtttaataacggacccttaattaatgttaacgacgtataataggtgaaagtaaactgatcccaggaatttaataatgtctacagtgttttgttagcctgttggtttggttttaattcgtaccggtttctactgcttctacattgttttatgtctatggattacagatacagcagtttgaacatctgattttaaagtagaagccaatatcactctttaatctgacagtgatagctgcggtagagacggacctacgtgtaatagagtgaggacataagtgtaatggagtgatgacataagtctccactcatttttgtgttgtaagtaatagatactagattttcactattatatcttctgctcagctcaatttatatgccaccgctcttatattttggtggtcttctgctcagctcacttccattttacccttggtccgcccctgagccgcggataccactgctgcctgatgctttgatctcactgatactgtattgctcatgtagcgaattaaatgtccacttgaatggtataataatgtcaaagggaattgccccaggaacaatgcatccatgcgaaccacgtggggagggttctcgatgcaataggtactattggctggcagcaagcacgtccctcaaggtcagatcttgttcagtgcctgcggagtatatgataatatgacaaatctcagcaaacaggaagcatcgctacaatattatatactagatgaggaagcagccagaccacacacacccacacaccccgcttcacgttctcaataatggcgccgttcccacgtcgtcttccggccgccgtgccacttctcctcctcctcggcgccgcagtggccagcgccggcgcggaggacaccgatggcggcaactcccgccggcggcactcccgcttgctgttcgcgttcggcaactcgctcaccgacacgggaaacggggccatcttcccggtgactgcaggcgggccattcacccggccgccgtacggggagaccttcttcggtcgtcccagcggccgggcttgcaacggcaggctcgtcctcgacttcctcggtacgtacgtacgtatatgcatgtcaccaacatcgtcaaacagcaacgtacgtatgcatctataactatacatgcatgatgcatgcagtggaggagctgaaggtgccagagccgacgccgtacctggccggcagtacggccgccgactttgcgaagaacggggccaactttgcgctgggtggtgcaacggcgctcgaccaggcgttcttagcaagcaaggggataaagtcgttcgtgcccatctctctcatcaacgagacgagctggttccagaacgtttcgaagctactggacgcgtcacactacggttcataaatactatatataaaagcgactatatatatacaaaatattattgttgagctaaaacctctcgtcttcgtttgacgacgacagatgagcgtaagatcatggcgaagtcgatcttctacgtcggggagatcggtgtcaacgactacttcgccgccctaagcaacaacgactccgtcgacgtcgcggtcagcctggtgccgcacatcatcgacaccatccgttcggccctgaccgtaagcgtcgatcggccggaggagcccaactcgctcgtcagctcatcagcgtctgttaattattagttatgaacaataaacctgggcaggtcatgatcgatgccggggcgaggacagtggtgatcacggggatgctaccgatcggctgcgagccgcagcagctggcccagttcgcaggcggcccggccggcgactacgaccctaccaccggctgcatcacgcggttcaaccagctcgccgagcaccacaaccacatgctgaggatgatgctgagggagctgcggaccaagtaccgcaggcgcaggcccctcaccctccactacgccgacatctaccgccccgtgatcgaggccgtcgcgtcccccgcctcgtacggcttcggcgacaggccgctggccgcgtgctgcgggggcggtggcggccccaacaacttcaacttcatcgccttctgcggcacgccggcgtcgaccacgtgcaccgacccgtccaagttcgtctcctgggacgggatccacttcaccgaggctaccaacaggcttctcgctcgtaaaatgcttcaggaactgctaagccgtggagcttacaatgttgcaatctgattttttctatgcccgcgagtcgtatcaacgtgtttcccatagcggatcggacctagcgtggaacctcttgtgcaataaaaaaataagtgtcatcacattcctcgcctttgacgagagaaccggatttcctttttcattatccaataaaagatacattaccgttgaactagtaagaggagggctgtacgctgtacaggatccaa

SEQ ID NO: 5003 - DNA, 1876 bp, Zea mays
attgggacctcgaccccggccggcgctgagtctctcacctgctggcggaggcggcccccaaaagccaaattccccagcccacaccacctccacactccaggttagggtttgctgtcggcgatgtcggatcggcagccgtcggaggaaccggaggagcaggtggacctggagggggacgacgacggcatggacgacgacgacgccgggtaccgtcgccgcggaagccgggacgactcggaggagcccgaggaggatgacgacaatgacgagcgccacggcgacgccgacgacgacgccgggatggagccggagccggccggaagtaaaggcggggatgacacgggcaaggggcccgacgtcgccggtggcgggcccgaggacgaggaggagaggagcaagtgggatgacatgctcgccctgccgccccatggctctgaggtcttcattggtggcctgccccgcgacatcacggaggaggacctccgtgagctgtgcgagccgttgggagaaatatatgaggtgaggttgaccaaggataaggacacaaaggagaacaaggggttcgcctttgtcaccttcatggacaaggaggctgcgcagcgcgccatcgaggatgtgcaagacagggagttcaaggggaggactttgcggtgctctctgtcgcaggcaaagcacaggctgtttgttgggaatgtgcccaaggggctgagcgaggaggagcttaccaacactatcaaggggaagggtccaggtgttatcaacattgagatgtttaaggatcagcatgacccaaaccgtaaccgtggcttcctctttgttgagtattacaaccatgcctgcgcagactatgccaggcagaaactttcatctccaaacttcaaggttgatgggagccagttgactgttagttgggctgaacctaagggttcaacagatgcttcatctgcagctgctcaggtgaagactatatatgtgaagaacctacctgaaaatgtttctaaagagaagataaaggacctgtttgacaaacatggagaggtcacaaaaatcgttctgcctcctgccaaggctggtcataagagagactttggctttgttcactttgcagaaagatcaagtgcattgaaggcagttaaaggaagtgaaaaatatgaaatcgatggtcaagtactggaagtgtccatggccaaaccattggcagataagaaacctgatcattcacacaggcctggaggaggccctaattatccccttcctccctatggtggtggtggctacatgggagatccatatggtgcttatggtggcggcggtcctgcatacaaccagccaatgatatatggcagaggaccagcaccggcaggaatgaggatggtgccgatggtgcttcctgatggccgccttggctatgttctgcaacaacctggtggaatgccgcctccgcccccaccgcggaggggtagtgaccgaagagacagtggcagaggtggcgaagggcacagccggcgatatcgcccttactagcttttcccttatgggctctactcccatcatgtggtatgaagcgtttaacttatgagacaacgagataggagcctgtgttcttgtcccagtataagatctgcgatggcacgatgcttgtaccatctgtttcttcggtgacttatttttatcatgcagtgcatgtgacttgaaactgtgatggacttgtattgctttctgccttatggcacctgtagtagtgaactgatgaaggaagttcatgcggactctgaagctttgttggcttagaatggtaattttgctgtattctatttcacaggaaaaaaaaaaaaaaaaccttagcaattgccgttcactcgagactagctcgtgc

SEQ ID NO: 5004 - DNA, 2085 bp, Zea mays
  misc_feature (16)..(16): n is a, c, g, or t
  misc_feature (29)..(30): n is a, c, g, or t
cggccctaccctcctntttttttctccannaccactttccctttgggacgaacacagaatcaccttcctttgcaaattgtcagtacccgatacaaccatacagctctagcatccttctactttaatcttagcaaatgacataaaccagttagcaaagtcttcgaacttccaggcaattttcgggacaagatcacagcatacacgaccaaagagcagctacacggaagagtacagagacgaataaagagacatggaaagattggtgtggggtgaagagactaaaagaatgaacaaggatcgcccgagcttctatttcaacggaagcataaggtttttgcacacccttactagcagcgtaaatgtctttatcttccatcggcagaggtgaaggagtccgcgaacccaggaggcctcgtagggatgctggtctgcgtgttatccaggctcgcaacaaacgacgaggtcgcaccgtcaaagtggctgctgtcctcgaacgcctgccatctcttcagagcctgaggcagggacatgttaaggtcgataccgtagctgtcatccgagtccggatcggctggtttccaaacttccgaaagggtagagagcacattgacagcatggcccatgtcaggcctctggtgtgcttccctagcgcagcagtggccagcaagctctgagacggtactaacactagcgtaggtttcctcgtcgaggtcaatgacagggtcgattgctttgcggaatgtttccttgttgagctgcatcctccggaaccatgtaactaaatgcatgctatcctcgggctgagtctcatcaagtgccttgcgtcctgtaatcagttccatcaagatgacaccaaagctgaagacatcagcttttgtggtcactcgtccagtgactgcatactctggtgcaaggtacccaaaagtgccagcaagtcttgtctctacggagacacacttcccatcagctggtgcaagccggaccaatccaaagtccgccaccttggccttcatgtcatcaccaagaagtatgtttgatggcttcaagtctctgtggataaaggtctgctgggcaaggctgtgaaggtactcgacgcctcttgcaacatcaagtgcaatgctaagtcgttttttccattccaatggtcgcaaatttttctcagaccactcaaacaggtgttggctcagtgccccctgtggcatgtactcatacactagaatcctctcattgccatcaaggcagtagcccagcagtgaaacaagattgcggtgtcggaccttggtcaaaacagcaatctctgatttaaactcatttagccccttgttacccataacaccagcctccatccgctttacagcaattttcgtgccgtcatgaagctcgcccttgtaaacagtgccaaaccctcctcgaccaaggatgttctcctcactgaagttgttggtcacattgcggagaacttggattgaaatgaccatatttccactttcaacaacatggatgtcgcgtggaccattgctcgcttggctatatgtctcgcttgcgcgagcaccatcgttagcatttccccctgcaactgtgattttaaccatgtcatctgaacctgagtgtcgcggatggataaccatggcatgtggactctgcacccttccgaaaggcttctgtttcctcttgtaacaatagaatcccaatgcagcaacaaggcctagtccaacgactgtaccagccactgagcctacaatgactccaacagaagatggagaggaacccccattgttaccaatgcttccgctgctgcctccccccgatagactgtcgttgctaccacctgatcctgctgttggtgcaggagcatccttgcctatgttagggttaccagcagttttcaccactgcactcttggaagcaaatgtaggaagtttcccatatagattgttgtttgacaaatcaacctctgtcagcgaaggcaacgcggcaacctcctcaggcacagtaccagtgatgttattgttagcaagatttagcaccttaagtgagctaatcttcccgatggacggtgagatactaccactgagacccttattg

SEQ ID NO: 5005 - DNA, 2177 bp, Zea mays
  misc_feature (2160)..(2160): n is a, c, g, or t
  misc_feature (2170)..(2171): n is a, c, g, or t
tcgctttgcttccggacgggtgtcgccgagggcagccgccttttaaaacccccaccgatgtcccgggccgggaaagagggaagccgcaggcagcatctgcatctctcgcccacctccgctccgcctactgctgctggtggtagggaggcggagaaggaggcccttgcgcccgcccgccggccggatcagagccgtagcaaccaccacccatggcggacgtgcacgaacctttggtgcgccgtaagaggaagaaggttttggtggactacttggtgaagttccgatggatcctcgtgatcttcgtggtccttcctatttcaactctgatctacttcaacatcttcctgggcgacatgtggtccgccatgaagtcggagaagaagcgccagaagcagcacgacgagaacgtgcagaaggtcgtgaagcggctcaagcagaggaacccgaagaaggacggtcttgtttgcacggccaggaagccctggatcgctgttggcatgcgcaacgtggactacaagcgtgcgaggcatttcgaggtcgacctttcttccttcaggaacatccttgagatcgacaaagagaggatggttgccaaggtcgagccccttgtcaacatgggtcagataaccagagctacctgcccaatgaaccttgcccttgcggtcgtcgccgagctcgacgacctcactgttggtgggctgatcaacggttacggcatcgaggggagctctcacctctatggccttttctccgacacggttgtcgcgatggaggttgttctcgcagatggccgggtcgtcagagccaccaaggacaacgagtactctgaccttttctatggcattccctggtcccagggaacactggggttccttgtctctgcggagatcaagctgatccccatcaaggagtacatgaagctcacctacactccagtcaaggggggtctaaaggagatcgcgcaggcctacgcggattctttcgcgccgagggacggtgacccggcaaaggtccctgactttgttgaagggatggtgtacacagagagcgagggtgtcatgatgacgggcgtgtacgcttccaaagaagaggcgaagaagaagggcaacaagatcaactgcgtggggtggtggtttaagccctggttctaccagcacgctcagacggcgctgaagaggggcgagtttgtggagtacatcccgacgagggagtactaccaccggcacacccggtgcctgtactgggaggggaagctgatcctgcccttcggcgaccagttctggttcaggttcctgctgggctggctgatgccaccgaaggtgtccctgctgaaggcgacccagggcgaggctatcaggaactactaccacgacaaccatgtgatccaggacatgctggtgccgctgtacaaggttggggatgcgctggagttcgtgcaccgcgagatggaggtgtatcctctgtggctgtgccctcaccggctgtacaagctgccggtgaagacgatggtgtacccggagcctgggttcgagcaccagcacaggcagggcgacacgagctacgcacagatgttcacggacgtgggcgtgtactacgcccccggggcggtgctgaggggggaggagttcaacggcgcggaggctgtgcacaggctggagcagtggctgatcgagaaccacagctaccagccgcagtacgcggtgtcggagctgaacgagaaggacttctggcgcatgttcgacgcgtcgcactacgagcactgccgccaaaagtacggggcggtgggcacgttcatgagcgtgtactacaagtccaagaaggggcgcaagacggagaaggaggtgcaggaggcggaggcggccatactggagccggcctacgcggacgaggaggcctaaaagctcgtggtcgttttgcttagcccattttaattagaacttgatggatgtagtgtgtgtctgtctcaagtcattttaattagaactcttaaagctcgtggtcggtcggtcagtcagtcagtcattgtcgttgatgtccagcgttgtgttttttttatattctctaatggaatctctcagattgattcgggaaaaaaaaaaaaaaaaaaaaaaaagaaaaaaaaaaaaaactcgaggggggggcccgggtacaaaaaaaaanaccccaaaannaaactt

SEQ ID NO: 5006 - DNA, 1690 bp, Zea mays
tttatattggatttatacatcctcttgaagttcttgtatcaccgcacctagagaattgtttacttcagttatatggcattatggaccattttcatttaggagacttctgattttatccatgctttacataattacattacatatttcaggctcttttgcattcatcacattgggttcctcgagcccggcgggcttttgcacaccatggagttaagttttcaagtctggaagtggacctcccagccatgatggctcagaaagacaaagctgtggcaggactaacaaagggaattgaagggctctttaaaaagaacaaggtgacttatgttaaaggctttggaaaactgtcatccccctcagaagtgtcagttgatttgattgatggtggtagcaccattgtcaaaggaaaaaacataataattgcaactgggtctgatgtaaaatcacttccaggaataacaattgatgagaagaaagttgtttcatctactggtgcactgtgcttgtcagagatcccgaaaaaactggtggtaatcggagcaggttatattggccttgagatgggttcagtctggaaccgccttggttcagaggtcactgttgttgaatttgccccggatatagtaccatcaatggatggcgaggtcaggaagcagttccaacgcatgctagaaaaacagaaattcaagttcatgctcaagacaaaggttgttgggtgtgataccagtggagatggcgtaaagctgacactggagcctgcagctggtggtgagcagaccatccttgaagcagatgttgttcttgtctctgctggcagaagcccatttacttctgggattgggcttgaaactcttggtgttgagacagacaaggctggcaggatccttgttgataagcgcttcatgaccaatgtgaagggagtctatgcaatcggggatgccatccctggtcccatgcttgcccataaagctgaagaggatggtgtcgcatgcgtagaattcattgctggaaaagaaggccatgttgactatggcacagttcctggtgtggtctatacacatccagaagttgcatctgttggcaagactgaggagcaggtgaaggctctaggaattgcctataatgtggggaagtttccacttttggctaacagtcgtgcgaaggccattgatgacgctgaaggggtagttaaggtgatcgcagagaaggaaacagataagattctgggcgtgcacattatggcacccaatgctggtgagatcatccacgaagctgtcgtcgccttgcagtatggagcatccagtgaggacgttgctcgaacatgccacgcacaccctaccgtgagtgaagccctcaaggaggcttgcttgcaaaccttcgataaagcaatccacatataatttctcattttttgtgtccaaactccaaagtttgtggtaattttgggtctgttggaaaaaaggcccctgattgtccttttgtttttgtcggcaatactgtgaattgaccctttgagttgtccatcttagcggggttttgtgcttccttggcttggtttatccatccaaataataacctgatactatgttttacattttatgcccatgaaccattgatggatatacatttctaaggttccagtaaccgcagtgttttgcgatgtttacatgtgactgttgctgtgagggcc

SEQ ID NO: 5007 - DNA, 4980 bp, Zea mays
  misc_feature (868)..(868): n is a, c, g, or t
gccgaagctcgctgtttggactcgatccgagccttgcacgaataagcgggtcgggctcggacaagaaactaagtatattgggctggtccggcatggcccgtttacctctaaacccgtcaaacccgttttttcaataaaccgtgcttaccggcccgcttagcccgtttttcggtccgatttttctgtgcttaccagaccgacccttttaggctcgctgcggaccggacttagacagggaaatgagcccacgagtttaaataggtcgacccagttttctaaccggcgggacaggcccaaaatgagtcgggctttatcaggccgaaccaggcggcccgtttggccatctctacctggggcagaggaaacataatttatttatgaggggcgtgattagcaatgtcgtgacgacgaggaacgattatcatcttcctgaagaaagggaacccttgattacacgaagccctttggctaacattctgcagcaacctgggggcccgacaaaacgcttccgtccacgcgaaactgatcgaaattcggcagcgctttccgcctcttttctgagtctctgacccacaagaagaagcaatctcccccagtctcaactgttttcacgacgccgaagcaaaccgcttggacgttcgtcgttgtattttgctgccgcaccgcaggccgcagcctgctcttggccacgcgaagttgcgaacgatctataacccaatcccacccaccggtgccggtgcgtcggtgatcggcctgcggcgcccacgaacgaacaggcgtcaggtgcgcttcagcgcgtcgcgcggaggcaccgtgctaagattccgcgggcacgtcccagcaagcgctggagtgcacgcgcgcgcangacgctgcccgttccccacccaaacgcacgcggggaagcgccgcccgcccgaggagaggagcgcttcccgtttccgtgcccgcaagacctgtctgtctgggtccggtgggtctccggaccaggtgtcgagtgccccgctcgctcgcgtagccgcgttgcactttttttgcttccgtccaaacgcaggacgcggaccaacccacctgctccattttatgcttcgccctcgctcgcctcgccctcgccgcaacgctttgcgatagagtttctgtctgctaccagcaccacagcctagcaccccaccgcgtctagggttttctgctccaatggccgccgcgagggcagacggggagcgcaggatcggggtggccatcgactactcggagagcgccaagaaggcgctggactgggccatcgacaacctgctccaccacggggacaccctcgtcgtcgtccacgtcctgcaccacggcgcggaggagaccaagcacacgctctgggccaagtccggatcccgtaagctccccccactcaagctctcgccgcatccatctctaccctacccttacccaaatgctcacccgctgcccgctggtgtctgtttcggtttcctgacggtcttggctcgtcggctcaatctgattcgctcgatcggtctcgcttgcttcgatccccgcagcgctgatcccactctccgagttccgggagcccgaggtgatgcagggctacggcgtgcgccccgacgccgaggtgctcgacgcgatcgacacggcagcgcgccagaagcaggtgcgtgtggtgtgtgtggacggcgttcgtgctacgttctggtcgagcgagttgaggggggataaccgaacacttgcccgtctccgtgctcatcagcggtcccgggtggcgaagctgtactggggcgacgccagggagaagctctgcgacgccgtcgaggatctcaggatcgattccctcgtcatgggtagtcgcggcctcggcccgatccagaggtatagtacaatcctaagactccattactactactatagtactattgaaatgttgcctcatcaggactggaatgcgctgttcagcctctgatagtaagttagtttctcgctttttctttttgttcggataagcgcgtcaattgagtgtctggaataaatggatatagtctagcgtgcatggatggctcgattgatgatagggatagcccgcatgccaagtcagtatgctggtgcagtactgaaatgttcaaacacagcacatctagttcttgttcttaatagcaatacttatctgaaaaatgctcttgttccttgtatcgttgcatccggtgattctgagctgtgaacgtgattactatatacttatttcttagtagccgtgatgagccacgcgatgctgccttgtgagttgggacctttttctaactcgcaagggggcattgtctttagcctgtccaagagttgtgaggttcgagacatcccaacatcatcgtgattgtcatttttttatgcagccatgtgaaactgtcgttgatatttaaatgctctacattagtttaggcatttgaaagattccgtataggatcagtcgaccaatgccgtggctgtgttgttcaacgctcaagttcatatatataaaactatcactagtgggtaactgcgtatacaagggttcaggaagttttttttaaaaattcagctcgatatcttgagttcttgacatttgtgtaacagactaacagctttctaccataagaaatggatcatttgtgtcgagaaacggctagaaaaactccttacaatattaatcagtgattcattttttttattgtcaggaaaaatgtccagccctgccttgctacatatttgtatacttagactgaaagagggcctcagtttttgctactctacctttccagttacatagtactcgttgttgaactctttgccccgcttaataatttagatgtcataaatcaaatttgagtgcaggtctctcccctcacttcttttatttgaaactcacgatatctggcactcaatatgaatgtaaattaccacattccctttttcatgcaacgccagttgctgatgacggtggtcgcggcctaggtactggggcgacgccagggagaagctctgcgacgccgtcgaggacctcaggatcgattccctcgtcatgggtagtcgcggcctcggcccgatccagaggattctcctggggagcgtgacaaactacgtgctgtcaaacgcatcgtgcccggtgacagtcgtcaaggggaagtagtggcctgggcagcgtgccagtgatatgaatgaagatgctagcgtgcagtttgtgtgggttatagctaaacactatgttccgtcttgttgctgcatttcaataaagcatgtgtcttctagatttcacaaatctctctgaggctctgacctctgtcttattagctgtgaaactgtccgtacttcattcctgttcagatcgaattcgaggattggttcataccccttttactgtcgtgtcgtttgaactgctggttagtctgctcaatttgtatttctgattgtcttgcaccacgtttggattgcagcacagagtggtccgatcctaaaaccgactcttatcgttttgtttggtttgagtcacgacatgacgacgacgtcctctgaaatttacacagcagcactgttaattttgccggacacccaaactcaaatatgaaaccacccgaacaccagtttgggtgataatccaaatccgagaccaaacctcatggatccccgaaacctaatctcaaaggccaaaaccacaccaagcacagcacccctacagctcaaacggttaaacccaccaaaaggtccatgtttcacaactcaaaagcatgttccagctccacacatttgatctctctaccatacatactgaccatgatctgttgcggcgtgtagtagcgtgtgttactgacttacagtagcatcccagggcggtttctcttgttgccgcttgttgcggcgtctagtagcgtgtgtcaggattggacaccagatgttgatcggatcaaaggacactgtctgtcggagcgcgagtaaccgtgaccagtccataacgaacggacatagaaagcaagcctggtttacacctcagtcacaacagggccaccaaactccacctcatccttttccatcatactgagagtacgggtaagtaagaatagtaggaacataatttttttttaaaaaagaagggtaaggacagattatgtacaacccaaatctttccgaaagatagcaggaacacgcacatatagcaggtgatcctgcgagctgcagactctttggcaactgcttttatcaaaactacttcaggctgacctaccagttcattagtaagttcagcactgcacggctgcacatctaaaaccacaagaacacacttagcgaaaacaggaacacaaaaggacgcagcctacatccacgtctgtccaggtgtgatgatgcatctaaatactgcctccaccgaccggattacagctattactttcggtccatgcctaacggctcgcatcaacagttccaacactattatgacaaaccaagctcagctccaccccttttttattcctgaaaaacaaaaggagaacaggatgtgaataaaatgatgtgaggccatggagaaagcatcgcaagtaacagcagaaacaggggtagcgcaatagggtgtgaacaaaatgatgaggccactgagaaagcattgcaagtgacaggggggtggcgggctgctaggattcaaggaagtgtaggctgtcatgataagctattcaaaacatgatcaagtcctatgtgtcaccgttatccttaatgcctatgccttatatacctgctaccgttttttctttaacaagtgacacttgccagcatcttaatcataaggtaacacttgcaagagattgtaatactactacttgccatgaaattgagatttagaacaactaatccaccaagatccgcagttcacttcaagttacacaaaaaaaaaagtagtggaggtaaaaactgatggtgtgatataacctgctctaagctgctaagataaactttctactacta

SEQ ID NO: 5008 - DNA, 1638 bp, Zea mays
gcacgagcctccctcttctttccggtgccgagcgtgcatcggcagagctgactgtgactggtgaccggagtagagaaggaagcctagcactagcagaaatagtaggcagtagcagggttgaccggaggggcagtggtgacccaacaacctccctcatcccctccccttctttcttattgccaccactccacgtctccaccaaacaaggcaacaagggagaagtagatctgcatctgcgagaggaggcagcgggggtggtgatgatggagagccagccgctgcaggccccgacggccacggctccggcccccggatctgcggagccagccggagctccgccggccgtcacccccggcaaggagttcacgcgcacctgcaagggcctcgtcgtcgtgctcatcggaggatacgtgctgctccagctcctcccttcgtcactcctttgacttgtgtctgcgccttgcaggacaatcccctatgtatggaccgttttcactgctggttacatagagcaagtcctcccaggggccattggcagttctcttggtcttctcttttgtggaaaggacattgaaccagcatggggccgcaaggaattcttgaagttcattattttgatcaactccatctgtggcattcttgcattttgctttgctattggactctactacgtcactggaaaggagagcttccttgtcacaccactttctggtttccacggttgccttgctggctttcttgtggccttgaagcagctcttaccaaaccttgagcttcctatgtgctttttctggaaaataaaggcaaagtggatgccattctttgttgtatgtttctcaagtatcatggccttcatcgtgcctgattccattaacttcctgccaactttggtgtccgggatgtacgttagctggctttacctgaggtacttccaaaggaacccactgactggacttaagggtgatcccagtgatgacttctccttccccagtttattcccagctgccatgagaccagttacagaccctgtggccaacctgtttgataggatgttgtgtgcaaggtccagacctttggaagtagctctcccaatttcagatcctaccaaggcttcaagaagaagggagcgtggtgagagggttcttgaggaaagattggcggccgacaatgctggtgacacagaggcctcgcctcgtggccatggccatggcaccgcggaagactaagaactttctcgcgacccatcagcgcctcttataggagccatggccgcccatggctttgctccctccagcgtttatagctctgcacttttgtcttctggagatggaactattcagttcacagcgaaccaataatatgatgttcttagtttctcttttattttatttttcgcttctttgtccgcgaagatttattggttaaattgtgtactagtagtcaattgttataatacagtgaaaaggagaggagagggtggtggcatttgcagccgattatttgttactggtcaaaattctgtactagtcatatactctactcatatatagaaacaagaatggctttgtcaaaaaaaaaaaaaaaaaaaaaaaaaaccaaaaaaaaggagcaaaaaaaaaaaaaaaaaaaagcggccaa

SEQ ID NO: 5009 - DNA, 2834 bp, Zea mays
gcacgagaccattacctagaacatcctaatcgaaaaatcgttctagtggtaccaccacagcctcctgtgccctcctgccgtccgtgacgtgacgcagccgagccgcgcgcgctctccgggccggacgcctccgctcgaatcgatggacgccgaggccggcgtcgctggcgccgaccagcttccgcggaggcagtactacctgaatctactgcttttagcttaccagagctttggtgttgtttacggggacctgagcacatcgcctctctacgtgtataaaagtacgttctctggaaagctcagacactaccaagacgaggagacagtgttcggcgtactttcgctcatcttttggaccttcactctgattcctttgcttaagtatgtcaccatcgtcttgagtgctgatgataacggcgaaggtggaccattcgctctctattcgctcctttgcaggcatgcaaaactcagcttgctgccaaatcaacaagcagctgatgaggagctatcttcatactacagaaatgggttcgcgcctcgcaatggatcttcaccttggttaagaaggtttctggagaagcacaaaaaaatgaggactctgtttcttctcatagttctctgtggcgctagcatggtgattggtgatggtgtccttaccccagcaatctcagtactctcgtctatgtctggattacatgttcgagctactggtctacatcatagttctgtagttctcctttcatgcattgtgttggttggtctatttgcattgcaacaccgaggtactcagaaggttgcattcatgtttgcaccaattgtcatcatctggctgctttccattggaggaatcggtttatacaacattcttcattggaacccaaatgtatatcaagctctctctccatattatatggttaagttctttagaaagacaggtaaagatggatggattgctttaggagggatccttctttctatgacaggcagtgaggcaatgtttgctgaccttggtcactttacgagtgcatctgtcagggtggcttttattaccgtcatatacccatgccttatgctacaatatatgggtcatgctgcatttctgtcgaagaacacatttcacatgccgacaggtttttatgatactatcccagaaccagtgttttggcctgtctttgtggtggccacacttgctgctgttgttggtagccaagctgttatttcagcaacattctccattgtgaaacaatgccatgctttgggatgtttcccgcgagtgaaggttgtccacacatcgaggtggatctatgggcagatatatattccagaaataaattggattcttatggttctttgcgtcgctgtcactattgcatttcgtgatactactcttattggcaatgcctacggtattgcatgcatgactgttatgcttgttactacattcttgatggcattaatagtcatctttgtttggcaaaggaacataatattttccctagttttcctggttttctttggatccattgaagctgtatatctttcgtcatctctcatgaaggttcctcagggaggatgggtgcctcttgtgcttgcattcatattcatgtcagtcatgtacatctggcactatgggtcaaggaggaagtaccagtttgacctacagaacaaagtatcaatgagatccatcctatctctcggtccaagccttggcatagttcgggttcctggtgttggattgatttacacagagctggtcactggtgtaccctccatcttctcccattttgtcacgaatctccctgccttccatgaagttctagtctttctctgtgtgaagtcagtgccagtgccatatgtttcaccagatgagcgataccttgtgggtaggattggacctaaagaatatcggatgtaccgttgcattgttagatatggttacaaagatgtgcagagagatgatgacaattttgagaacatgttagttatgagcatcgcaaagtttattatgatggaagcagaagatgcttcttcagcaagttatgatatcgctaacgaaggaaggatggcggtcataacaaccactgatgcctctggcagcccattggccatgagggatttcgacggcctagctgactccatgtctacgaggagcagtaaatcagaaagccttcgaagtttgcaatcctcctacgagcaagaatccccgagtgtaaaccggcgccgccgtgtccgctttgaggtcccagaggaggatggcatgggtcagcaagtgaaagaagaactcacggcactagttgaagcgaaacatgctgggatcgcatacatcatggggcattcttatatcaaagccaggaggaactcaaatttcctgaagaagtttgctattgatgttggttactctttcctccgaaagaactgcagaggcccatcagtcacgctgcacattccacacattagtctgatagaagtcggcatgatctactatgtttagcttaaggcccattgccgaagctcacatgtggatacccggtcggggcaatgcttgtgctgtctgcggattgtggtgtggaaggagttcaggcttgttcgttctgggccaagtttcagcttgtagagaagaaggcagacttctttgttaatattatttttagcctaaataaaccagcacaatgttagacggtgatgtttctcatttggcatatttgcatgcatgctctgtaattttttctgcgagctatgtgatggaaatatatgcatcatctttataaactggtcagggttctactccttccgtttcaaaataatagttcctttacctcttgatttttatgtct

SEQ ID NO: 5010 - DNA, 1814 bp, Zea mays
gctccacccacccgacccattgctatcctacctgccagcgaacctgtctcgtctccttgttgcccacgtggcctcgccgtcgccgcgagctccaccttcctcagctctgccccgagcgcgatgtggcgagcgacgaggcggtctccgccgttcctgcgatggctatcgtcggacgcagcctcctctaaggcgccgcggcagcgcgtagcggcgctgtgggggaacggtgactacgggcggctggggctgggctcgctggagtcgcggtggagccccacggtttgccccttcttcctcgcccgcgccgccgacccgcccgcctccctcgcctgcggcggcgcacataccctctttctcacccagaatgggcgagtgttcgctacagggctgaacgactttgggcagctggggataggaacctctgttacacatatgctggagcctgttgaaatttctggatttcacgaaagagttgtagaagtttcagctggcaaccatcattcttgtgcagtcaccgcggatggtaagctctttgtttggggcagaaactcaggtggccagcttggccttggtaaaggggcaggtaaagtagtttctaccccaacaaaggttgattgtttgactgacctcagagtaaaaacggttgctctgggatcagagcattcaattgctgttacagaggaaggtgaagtcttgagttggggagctgctggttctggtaggctcggacatggccgtcaatctagcatcctgggattttctctgacctcaactgaatatactccaagattgatcaaaaactttgatggtatcaagattaaaaagatagctgcaggaatgttgcactcagcttgcattgatgaaaaagggatttggaagaccgaacgaagaattcagaccaaatattgttgaagagataccattttcagaagaagttgcttgtggaggttaccatacttgtgttgtaacagatagcggtgatctgtattcttggggttcaaatgaaaatggctgccttggtctgggaggtacggatatggtccgctctccggaaattttgaaaagttctctatttaaacttcctgtatctaaggtatcttgtggttggaagcacacagctgtagtttcaggtgatgacatctacacatggggttggggaggcgccaatgggacttttttcgaagagggccattcttccggtggacagctgggacatggaaacgacgtagactattttgagcctatgatggttccctttggcacgaatgcaagagccgtccatgtatcgtgtggcttcaatcatactggtgcaatttacgagtgctccgaggactttgactgacgtgccacctgcagacagcagatccgcatgtcttggagacttaggttagttatcaaattatactcgctagaagtgcatataaacagcataaataagctctgatgttggacctgcatttatgtgaagagaaatatagaacaagtgataacacccctgagagggggatgtaaattaaacagaataagggatgaactggatgcattttgtgatgcatcagagttacttgccagtgtatagcatttcttcatttattggctggttctgtattattttgccaggtactaagaaatccattgcctgatgtctcagcaggctgtttgtgtacattatgattgcttgactgcttggtgtcgatgcttgctgtgttttttgtgtgtaaataatacatgaatcagttaatcgtgcttgtacaattaaatatgtacatatatcagtgcatcacttattatatgtaagaaatttaaaaaaaaaa

SEQ ID NO: 5011 - DNA, 1113 bp, Zea mays
acaaccaccagataaagctgcaagctgcttatcttctcccgtcccataggttgctaggctcggccgtgtagagcagcaagagcacgccgcgccaagcaacaaagagggaccccgcttccatggaggtggtgggcggcgtgtcgctgaggccgtcgccagcgccggcgcgtatccggactaccctgccacccgtcgacgtaggcggacgcttccttctccgccgggtcgcggggcgccagccggcgaggcgcgcgctggtcgtggaggcccggggcggcaggggctggtcggagcggcagatgcagcagcagcgccgcgcgccgctgctgccgaaaatcgaggacgacggcaacccgcgattcgtcatcttcatccgcaccgccaatgtctacttctggtacccgctcaacatcatcacgggcggtacgacggcgaagatcatgctcgccgccaaggacaacttcctcggcaagtacatctacaaggacacgctcgccaggaacctcgccgccgtcatttacaaagacgaggacgtgatcatagacacagcgaaagagcagtaccgtgtgctcaagaccgaaaatcagtttcggtatggctacaaagttgtggagaaagggaacataaggtctgctctgacgacaagcaatgtgatcgaacttccaaagaaggacgagctcaaaaccgtggttgacaaggtgaaggacttctttggcgacgtgactgccggcgccaaagaatcctttgcgcagataacagggtctgctgtcagcaaggaggaagaggaagcagagagcaaagagaagttccgctccaagagacgaaagaagcagcggaagtcgaaggagggcctcaagacggagaaatgattcagtcagtcacacaagtaaagcaccggctgtagtttcgctatcgatgtccgagaactgttctgtaatttctccagcttccttttttttgtttgttttgtaaaaagacgtcgtgtaacttcattgcgactaacgtgtgctatgccttctcactaaatctcacaaaatgtgaaggtactccctacgttctcaatcaaaaaaaaaaaaaaaggcacgagcacgcaaatggatggagtccaagtgt

SEQ ID NO: 5012 - DNA, 3268 bp, Zea mays
cattgggtacctcgtcgccacggcccacggcatcgccaaccagtgaaatcatcctaacaaccggcacgccatcctcgccgccgccgcagcctcctgcgctccgctccactggtggtggtagggagtgcagcggatccatcccgtgtcccgatccgatcccttcgctgctagtatcgagccttgccatcgtgctcaccgaagaggacttcatcagtgaagaattgctttagcaacacttacaatataaggaaagagggttcacgttggatacaatccggtcctcccttgttgctaaatagggtaaagtttgttggcaagaggacatcctgttctgttgcaacagagccgccgcctgctaccactgaagaaccaggcatggatgtccccaaggagatattcttgaaagattacaaggcacctgattattattttgacacggtggatttacaatttcaacttggtgaagaaaagaccatagttacatctaaaatagttgtatctcctggagttgaaggcatctcagctccactagttcttcatgggcatgacctcaagctcatatcaatcaaagtcaatggcactgaattaaagggtgaagagtataaagtcaattctcgccatctgatgctttcaacacctcctgctgttgtattcaacttggaaattgtcacagaaatatatccccagctaaacacatcactggaggggctgtacaagtctactggtaacttctgcacccagtgtgaagcagaagggtttcggaagattacctactttcaggaccgcccagatgttatggcaaaatatacttgccgcattgaagctgataaaactttgtatccggttttattgtccaatgggaatcttattgagcagggagaccttgagggtggaaagcattacgcactgtgggaggatcccttcaagaaaccaagctacctgtttgctctagttgctggtcagctgggatgccgggaggattcatttgttacatgctctggccgcaacgtaacactaagaatttggactcctgcccaagatttaccaaaaacagcacatgctatgtattctcttaaagcagcaatgaaatgggatgaggaggtctttggtctggagtatgatcttgatttattcaacattgttgttgttcctgatttcaatatgggagcaatggaaaacaagagcttgaatatatttcaatctagacttgtgttggcatcaccggagactgccactgatggtgattatgctgctattttgggtgttgttggacatgagtatttccacaactggactgggaatagagtaacttgccgtgattggttccagctaaccctgaaagaaggactgaccgttttcagggatcaggagttctcttcagatcttggctgtcgtacggtaaaacgtattgctgatgtctccaaacttagaatctatcaattcccacaggacgccgggcctatggcacatcctatccgtccccattcttatatcaagatggacaacttctatactgttacggtttacgagaagggtgctgaagttgtcagaatgtacaagaccatgtttggagcatcagggttccgaaagggcatggatctttattttaaaaggcatgatgggcaagctgtcacttgtgaagacttctatgcagccatgtgtgatgcaaataatgcacaactgccaaactttttacaatggtactctcaagcaggtacgcctatagtcaaggtggcatcttcatatgatcctagttctcagacattctctttgaaacttagccaagaagtaccacccactcctggccagccggttaaggagcctatgttcatacctgttgctgttggacttgttgactctactggaaaagatatgcccctcacttccgtttacagtgatggaagtctccaaacagtctctactgatggccagccagtcttcactactgtgcttcagtttaaaaagaaagaagaagagtttatgtttaaaaacattcctgagaggccagttccttctttgttaaggggatatagtgctcctgtccgtctagattctgatctgagtgagggtgacctatttttcttgcttgccagtgactcggatgaatttaacagatgggaagctggccaagttttggcacgtaagttgatgctcagtctcgtagctgatttccagcaacagaaaacactggttctaaatccgaaatttgttgatgggattagatcaattctgcgcaacacaagcttggataaggaattcattgcgaaagcaataactttgcctggtcaaggggagattatggagattatggatatgatggaagttgcagatcctgatgcagttcatgctgtccgtaactttattaagaaggagcttgccgtgcaacttaaagatgatcttcttgcggctgtgaaaagcaacaggagttctgaggcttacacatttaaccatgatagtatggctcgccgtgcattaaaaaatacatgccttgcataccttgcgtcattgaatgagccagatttcgttgagcttgcactgcatgagtacaagtctgcgactaacatgacagagcagtttgctgcattagcagcattatcccaaaatccaggccaagttcgtgatgatgccctcttggatttctataacaagtggcagcatgaatacttggttgtaagcaagtggtttgctcttcaagctacttcagagattcctggaaatgttgcaaatgttcagaagctgctgtctcaccctgctttcgacctgaggaatcccaacaaggtgtactcactaatcgggggattctgtggctcacctgtgaacttccacgcgaaagatggttctgggtacaagttcttgggtgagatcgttttgcagcttgacaagataaaccctcaggtggcctcccgcatggtttcagcattttctcggtggaggcggtacgacaagaccagacaagctcttgctaaggcccagctggagatgatcgtgtcggccaatgggctctccgaaaacgtgttcgagattgcttcaaaaagcttggcggattagcttgggcagttccgaggaattgcgagtgggagtgcttaactgaatctctcttttgttggtaaaatgacaagtagagataataaacaggcgggccgaatttgcatgaactgataaaatataagtgtgatgatgcccgctttgtggggggctttggagcaaaaaaaaaaaaaaaaaaaaaaaaaaaaaaaaaaaaaaaaaaaaaaaaaaactcgaagagggg

SEQ ID NO: 5013 - DNA, 1081 bp, Zea mays
aggaagaacctaggactatatacacacaacagatacgaatcgaaaagcgccgaggaaagaataaacggcgagccgcccggcgggccggcgttaaacccagaagcctcctcgtcctctctctgactctctctcaccctctccctccctccctcggggtcgcggttgcttcctcgcggccgattcgtatcttccgcggcagcagggagggtacggtactcctccggccggcgggaggagaagaggagcttcgagatgggggcgtccctcgcttccgcgggcttggtgaactacccgcttgtcgcggcgctcctcgcgttcgctctcgcgcagtcctccaagttcttcaccacctggtacaaagaaggtcggtgggatgccagacaacttatagcttctggcgggatgccatcatcccactcagctacagtgacagcactttcagtggcagtgggaatccaagaaggctttcgtagtgcaacatttgcaactgcactagtctttgcatgtgtggttatgcatgatgcttttggagttcggttacatgccggaaagcaggcagaggtgctgaatcaaattgtctatgagctgccagaggaacacccattatcagagacaaagccactgcgtgaaatccttggacatactgttcctcaggtcgtggccggttgcatccttggaatcctcatggctgtcgttatgcttttggctctcgggaggtcttagtcaagtgttgttcaccctatatctcgctggtgatggctacaaagcataaaaacatgatctccccatggttctggctgtccaagtgttcgatagtacaaagttctaaccgaatttagatctggactgtaggtttcaggttgtagctcgagttggttgctgtaaatctgaaagggtcacttttaattccaaccacggtgtaatggaagctttgttatacaatcagcagcggtaagatcattttgcagatcagtatggtcgataccatgccgtcgcatttgctttaaaaaaaaaaaataaaaatcagcaagcctttttgcctcttccagaaaaaaaagaaaaaaaaaaaaaaaaagcggcc

SEQ ID NO: 5014 - DNA, 2001 bp, Zea mays
gcacgagaccattacctagaacatcctaatcgaaaaacttccgtccgttcccccgaactctctctcctcctcggccacctcccatccccgttccttccctccatctcatcatcaccgccgccagcgccaaaaccctacccacccacccaccgatggcctccccggcgccggcctcccccgcggccgcggcggcgcactgccccccgccgcgcatcggtctcgcgggcctcgccaccatgggccagaacctggccctgaacatcgccgagaaagggttcccgatctccgtctacaaccgcaccgccgccaaggtggactccacgctgtcccgcgcgcgggacgagggctcgctgccggtgctgggccaccgcgacccgcgcgggttcgtgctgtccctcgcgcgcccgcgcgccgtcgtgctgctcgtccaggccggccccgccgtcgacgccaccatccaggccctctccccctacctcgagcccggggacgccatcgtcgacggcggcaacgagtggtaccagaacacggagcgccgcatcgaggaggcggcggcgcgcggcctcctgtacctcgggatgggcgtctccggcggcgaggagggcgcgcggaacgggccctcgctcatgcccggcggcagcgccgacgcctacgccaacatcagggacatcctccagaaggccgccgcgcagacggaggacggcgcctgcgtcaccttcgtcgggcccggcggcgccggcaacttcgtcaagatggtgcacaacgggatcgagtacggcgacatgcagctcatcgccgaggcgtacgacgtgctccgcaggctcgggggcctgtccaactccgagatcgccgacgtcttcgcggagtggaacaggggggagctcgagagcttcctggtccagatcaccgccgacattttcaccgtggctgacccgttggacgggagcgggagcggcggcggggcgctggttgacaggattctggacaagactgggatgaaggggaccgggaaatggaccgtgcagcaggcggcggagcttgcggtggcagcgcccacgattgccgcgtcgctggacgggaggtacctctcagggttgaaggacgaacgggtcgcagccgctggggtgctggaggaagaggggatgccggcaggcctgttggagacggttaatgtcgacaagaaggtgctggtggatagggtcaggcaagcgctctacgcctccaagatttgcagctatgcgcagggaatgaatctgctgcgagccaagagcgtggagaagggatggaaccttaacctcgcagagcttgccaggatctggaagggcggctgcattatccgtgcgaggttccttgataggatcaagagcgcgtacgacaggaatcctgagctcgccaatttgattgttgacagagagtttgcaagggagatggtgcagcggcagaacgcgtggaggtgggttgtggcacgcgcggtggaggctggcattagcacgccaggaatgactgctagcctttcgtacttcgatacctacagatcaagtcgattgcctgcaaatctgatccaagcgcagagggatctgtttggtgcacacacctatgagcgcattgactgtccgggttcattccacaccgaatggaccaagctggcgaggaggagcaatggcgcagccatttgaggaattggttggtatgagaagggatgttttctgctttgggtgatttctctctgtgggttatcttttgttttactattgttatctttatgcttctagatccaagtcgagtacttcaaataatgctgtactgtatggttggcaagtgaagaacattgtgtagcttcagttttactgtgatgtaggtacacacagtttgattctcttaattttggtatgcaattgctatgatgcctctcaaaccacaatgttgtgtgtttaaagagttatctgaaatgtgttgaaattgctactaagaatactgagttttgcctcaaaaaccaacccc

SEQ ID NO: 5015 - DNA, 2901 bp, Zea mays
ccccgacccatcagtagagggcggcggctgcctcctcttcctacccgcgtccgagctcgcccccttcctcgccaccttgggaggcgacgagcatcaccaggacaccaggttgcctatattttcttccccttcttgaaaatggatcatagttctgacgaagatacagaaatcagtgattctgagattgatgattatgaaggaaaaatttatgcaagactgatgtcaggagatttaaaattaaataagaatggagaaaattacatttgtcccttctgtagcagcaagaagaagaattacagtaaaagtagcctggttcaacatgcctcaggagtcagtgcagcacctaatcgggaggcaaaagaaaaagcagtccatcgcgccctcttcaaatatttgaagaatggtcttgctaaatcacctgaaccagggtcacatgcaactcctgtggagccacaacctcttcagaaccgagacgagaagtttgtgtggccctggatgggtgtcctagttaatgtgcctactgaatggaaggatgggcgccaaattggagaaagtggaaatcgtctgaaggagcaactatcacacttttgcccactgagggtcatcccgttatggacttttagaggtcatacaggaaatgctattgttgagtttggaaaggactggaatggtttcagaaatgcgcgtacctttgaaagtcactttgcggcaggaggattcggtaagaaggactggattggaaaaaagaatcaaggatccgagctctatggatggcttgcgcgggctgaagattacaattctccaggaataatagcggaccacttgagaaaaaatggcgacttgaaatctgtcaatgatcttgcaaaggaaggagcgcgtaaaaatgacaggcttgttgctaatttagctaaccaaattgaggtgaaaaataggtatttacaggaactagaatgcaaatacagtgagacaactgcatcacttgagaagatgatggggcaaagggaacaacttctccagtcatacaatgaagaaattagcaagatgcagcagctagctcgcaggcattctcagaagatcattgatgagaatcaaaagttgcgttctgaccttgaggcaaaaatgaatgatcttgatgtgagatccaagcaactcgatgagattgcagcaaaaagcgattatgacagaaggagccttgagcaggagaagcaaaagaatgctatcaaatcgagtcatcttaaattggcaacattagagcagcagaaagctgatgagaatgtgctgaagcttgtggaagaacaaaaaagggagaaacatgctgcgttaaagaagattctgatgttggaacaacaattggatgcaaaacaaaagcttgaattagaaatacagcagttgaagggcaaactaaaagtgatggagcatatgccaggtgatgaagattcagcgtcaaagaataaaattaatgagctgagtgaggcattgcaagaaaagatagatgaactggatggaatggagtcacttaaccaaactctggttatcaaagaaagcaaaagcaacattgaactgcaagaagctcgcaaagagctagaaaatggcctgcttgatctttcaggtgggcagacacatataggaatcaagagaatgggagagcttgatctaaaagcattttcaaaggcatgccaaaaggagcgtacagaaaatgcagaagttactgctgcctttctttgttcaaagtgggaggctgaaataaaaaatcctgactggcacccttttagggtcgtcacaattgatggaaaggagatggcaataatcgaggatgatgcaaagcttcgagcactcaaagaagaacatggagaagaaatctatgcaatggtgacaaaggcgctgcttgaaaccaacgagtacaaatcaaaaggcagctaccctgtgggggagctatggaacttcaaagaaaaccggaaggtgactctgaaggaagctgtccagtttgtcctgagacagtggcgaacaaacaggaggaagcgataagctctcggccacccaatgctcttggctttttttcccaccacctggtccgaaagccatgagttcgagagctagtaacctggaaacagtagtattaattcgtgataaaatcaacagggcgatacagccctgtggatctgttccttgttggatataagctggcactcctattgcagtgtcagcatcagtggactcgaacgccattatggcgttatccttgtgccacctttgtaacaagtagttcgttcttgttcttgaaccgtgtgttgtagttggcccttggccgcatgctaccggctctgtacggctgtgcctacaaagttgcggtggaacatgcagactcataataaagcatgcttgggctcttgtgataaaaaaaaaaaaaaaaaaaaaaaaaaaaaaaaaaaaaaaaaaaaaaaaaaaaaaaaaaaaaaactttcctttcgttcgcgtccgaacaaatcccgtgctccccggggggaaaaccctccccacctccggcggcggcggcggccctggcaaccgggtgtcttctccggcgagtctcccccctagaaacaaaaaaatatggatgtccctgttgatgaccctggggaaaacctcactggaagtcctagtacccttggcaatgaggaaaaagccactacttatgctaatgtgcaagatcagcccaaggaaaaaccaaaaaagctttacgaggaacccaaagacccaatgcaagacgagttgggtaaccaaggccatgtgaccataaacaatgaaaatgtgggaggccaaaacaaaggggaccaagctacccccacagagcacggcaaggaagctggggtgaaccaccatgatgctacagttcctgatgacaaaaaatggcctgggtggcct

SEQ ID NO: 5016 - DNA, 1820 bp, Zea mays
ggcccaaatactgaacccacaacccgaaaccagcaggcaacaaagcaaccagaggcagagcgttcttcttccccgacggcccggggcccgggccgacggctcgactccactagtcgctggaaccctctgcaacaaagccgcctccacctgaccacctcccttgagctcttccccttcctcgtgggttgtgcgagccctctaccggcgcgcagtacaggggctgattgggtgatcaaacccgcaagatttgggtttgtgatttgggagcaggaggcggtggcaatatggaatataaggcgagatctactggaacttcaggaacttcgtctaaaagtttccgtgatctgtacaatatgaagtactcgagctacttaaacgacgaaccaatgccggatgctacatcggaaaaggagcagggaaatgagtatttcaaacagaagaagttcactgatgctattgaatgctactccagaagtattgggctgtctcctacagcagtcacatttgcaaatagagctatggcatatcttaaactaagaagattcaaggaggcagaggacgattgcactgaagctctgaatctggatgatcgctatattaaagcatactcacgccgaattactgcacgaaaagaacttgggaagcttaaggaggcaatggatgatgctgaatttgctatcagtcttgatccaaacaattcagagctaaggaagcagtattctgagataaaagctttgcacatggagaaaatggctaaaaaggttccagtgccagctaaacgtgcagtttctggaattgataaaactgcagatgtcacttctcacccaccgactatctcccagaaggacactattatggaagttgatctgcctgttagagatgcaatgaagatcaaagagagtgcaagcgtcaagtctaacggaggatctggagtaatcatcaatggcaataacgtgcagcagctccaaggtcgagatgccaaccagaagactgggccagaagtttcagtccaagatcttgcagctcgtgctgcttcacggtatatggccggcactgtgaaaagcattaagacacccaaaacagcttatgactttgaggtttcttggagagctctttctgatgacactgcccagcaaatacagttactaaagtcgattccaccagcaagcctaccagagattttcaagaacgcactttctgcaccttttcttattgacatcgtgaagtgtgcagcctcaattttccgggatgcggaggcattagctgtcagtattttggataatttggctcgagttccacgcttcgacttgataatcatgtgcctttcatccatgcacaaatttgaactgaggaagatatgggatcaagtattccttgctgaaaaagcgctggctgatgatcagatggaagctctgaggcagctgcgaggcagatacattccgggaggatggcaggatagcatgctcacttcgagttaaatcaatcaatcaaatgacgacgatgtaaagcaggattgttacaaaaaccttttgctggcttcgcaactgatgtctctgcatccatctgttctagaatcaggagtgcctgtcgattgttaagcccactggtctggatgtagcgaacggttgaagcatccagtgtaggaacatgtgtcgactgcaaatggttgagatccgttctgttgtgcttgccgctactgtaacctcgctttgttgtgcgccggattcctgacgctggcacatcgtacgcttgtcggcgacaactttatggaacacacacattttgatgatttaaaaattcaaaaaaaaaaccccgcgcat

SEQ ID NO: 5017 - DNA, 913 bp, Zea mays
ccgccacgcccccgcggggcgggccctgattcacgtggagcgagtgctgctcctgctcggcatcggctgctctgctgccgtggcccgtgcgtgggatttagctcaggaacccacgcctgacatcccctcttcctccccggccggcgatgtcgtcttcgtcttccgcgctggccaaaggcaagtcggcaatcggatccgcagccggatctgccaaattcgaggccaaggggaaattctcctcctcctcctccccagctgcggcagctaccaagcgtggaaccaccaccagcagcagcagaggtagaggtagagggaaggccgacaagaaggtctactccttgcccggccagaagttcgatcctccggaggagagggagcctctcaggattttctacgagtcactgtccaagcagatcccctccagtgagatggctgaattctggttgatggagcatggtatgttgtctcctgagagagcaaggaaggcatatgaaaggaagcaaaagcggcagcagcaagtgaggatgggtaccccaatcaagtcttgtgcagtgagaaaagataataaacctgaaagttccaagaagccaggcattatggattccaaggcaaagagaagagttgattacagtgacgacgacgacgatgacttcattgtgaaaatgaagagatccaggggatgacatttacttgtaatttttttattaattatatcaagtacagataccaaaaagacatgctttatataagctagggtcctaattaattaaaccctgcaactgtacccgcatgcatcttgaatagatatactgaggtttgcaagtttatgctgttgaattgaattgtaatactatgtatgtgcagaatttaatttgtctacaaatgtatctgctaggccaaaaaaaaaaaaaaa

SEQ ID NO: 5018 - DNA, 2134 bp, Zea mays
agggttttgttacggtgagtgataagtgtgtctgtcgatctgtcggtgcattgcattgcattacattacagcaagctaggttggcctttaaatagagatccatatacaccgtctcctatacccacgcgccccccgacgcgtgggtcttcttcttgtcagtaggtgtggcctgcacagctagcgccactgcccactgtaccgccattattttgttagcatggccccgagtaacatcgtcgttcagagcagcagcactccgccggttgccggcggcgacgaggagttcgcgccgtctgtatggggagatttcttcgtcacctatgcccctcccgtctcacaggcatcagagcagcggatgagtgagagagcggagctgctcaaggcgcaagtatgtcaggcgttcgatgctgccagcatggatgttgcaggtctggtcacgtacgtcgacaccctcgaacgcctcggcttagacaaccacttccgcgacctcatcggagctgccctggaacgaatcggagctgaggagctgccggagcacggcggcggcctgcacatcgtcgcgcttcggtttcgcctgctccggcagcatgggatatgggtatctacagatgtgttcgacgcgttcagagaggacgcgggcggtttctgctcgagcctctgcagtgacgaccctaggggtctcctgagcttgtacaatgcggctcacatggcagtacccggcgaggtggtcctcgacgacgccatcgccttcgcgaggggccgcctcctggacatcatcagcaaaggcgaggtcaggtcaccggtgtcagagcagatcacacgagccctcgacatccccctcccacgatttacgaggcggctggaaaccatgcactatattgccgagtatgagcatgaagaggcacacgacggcctgctgcttgagctcgctaggctcaactttgtccttgtgagagcgcttcacctcagggagctgaaggacctgtcactatggtggagggagctctacaacactgtgaagctcccgtacgctcgggaccgtatggtggagatctacttttggacctgtggtatgcttcatgaggaggagtactccctggcacggatgttcttcgccaagacgttcgggatggtgtcactgatggacgacactttcgatgtccatgctactctagacgagtgtcacaagctcaaagaagctatgcagagatgggatgaaagtgaggtctccattctacccgagtatctacgcttgctgtatatcaaaacacttagcaacttcaaagagtttgaggagatcttggaaccgaacaagaagtaccgcatggcttacacaaaagaggcatacaagttgtgctccaaaaactacctaaaggaagccatctggtctaaccagaaataccagccaagcttcaaggagcatgaggagctatcaatcatgacctcaggcttgccgatgctcacgatcctaacactaatgggcttcggtgacgaggcaaccccggaggcgttcgaatgggtaagcagtgttcctgaaatggtccgcgctggttcgcaggtcactcgcttcctcaacgatttgtcttcttacaagttgggaaagaacaagaaagatatgcctggctctgtggagacctacatggtagagaatggcttaacaggagatgaggctgcagcggcaatcgcggcacttctagagaacaggtggagaatactaaaccaaacaaggatggagatagatcacacgctactgccagcggcgcaggtggtgctcaacatggcgagggcaaatgagatcatttacctccacggcagagacgcctacaccttcggtgctgacctcaaggaccttgtcaccacactcttcctcaagcaagtgctccctctctagacaatactctgatcacacaaccagattggctataacgattctcgtgttgtattacgctttgtgtttcattatgcacgctatatatatgatcaatgtacctgtttctatcatattgatggtaatataatattctaaatggatatagttaacttaaaaaaaaaaaaaaaactcggccctatccagcgactaataaaaagaaacagaggaagtattctaaatggatatagttaacttactgtgctc

SEQ ID NO: 5019 - DNA, 4797 bp, Zea mays
  misc_feature (2212)..(2212): n is a, c, g, or t
aaggtcgaatctttttcactcatacatttcttggctttttgttaagataagtgtaatatttattattattaatttaatatctgatgtgaatcatatgtttactccgatattaaatttattttatgaatatcaaatatgattatattgcgacggatattgtactagtgttttttctaattggagtcactccgttttagttactttgtaaccaaacaacaacaaaactgggacagaacagctccgttctacttggctcttcaaccaaacactacctaagagtttcatcaacaaaatactcgctccatttcaatttatatttcgtttgactttttaaccttaggtttgactgactcgtcttattaaaaatttaataattaatattaatttttgttgtgatattgtttagtgtataatatactttaaatatggctttatttttttcaaaaattgattaggacaagtcagttagatgtattttaaaaaaagttaaataaattataatttagaacagagggagtattttgttaatccgaacaactgggtctaagttattttctgcacaaatgaaccggttgcatgggatccggatcatcggcagtcgaacagtctgacaggtcctccggcgtcgacgcgtgagagcagtcgactgccgagtatcccaatccgttgcatccgtcggtgacgggcgaactttgaatgcacgctaccaaaagaggttggaaacgctgactactcagcactggaaaaagtacactgaaaaacttgttgaagtgaaataacgacaaaaagaaaatatggagtttttcatggcggaaaggagcctgccagcctgggcgacccttttcaatagccgacacgtcgagaggagccccttgttgcagcgtgagtgcagcaggcacagggaaggggacaacgtcaagatcctgtcctctgcgtcgactgtcgagggatcggcatggcgttgagggtgtcccccgtgtcgcatggcgccgcggcagcgccgctgccgccgctcgcccggaggaggatggcccgtggggtggtggtggccatggcgtccaccatcaacaggtgagcacagcggatccctcgcctctcgctgtcttcctgaccgtgagatgcttttttgcggaaacgtgtcggttgttgggagccacaatcgttggggtaagtgatattcccgatctgcattgacttggtctgctggatcgaagcaaatcactggtgaaagttttacctttgcgattgattcgtgatctgggtggggcagagatgccacattgtttttttcctcctcccaccccctcgtttttatcgagatccacgattttggatacatttgtgactgatttgttgtcttcatctctcagttgattttttttatctatcagtcgattttttttttgtttcatctctcagtcaattgcggcggtattagtacatgcagaaagtagttggctgttgatgtctcaaacttgttcaaatctgctgatggcgattgagatgtcgtgagcttaagaaacgattggtttacatcagggattaccatcccgttttgaaatcgaattccaccaggcgccgaaaacgagattaccgtcccgtttacatcagggattaccatcccgttttgactttacattctttctaaggctctctccggcaactctatgtctcattccctattgcaccttttattttaaactccactaaacaaacaatgttatctacagcaaacaatgttttatacgtgtaatattacatcctaatttgtcaattaaacaactagattttgtcactctatttgatgatgataataaatatgttcgttttagagactatgatgtaagaatttgtcaaacttcactccaatcataacataacttatgttcaccggacgaaattaggattcatatcaattaatcacgattagtcggacgacttaagcgattaatcgtgattggtccaaaccgacttggacgattaatcgtgactaatcgctattaatcggacgagtaaacattgagcgtcacaagaacactttgaaatatagatgattatcaatagtcaaactgatgcatttgatactctgaaacagtaagaaagcaatcactacctgccatcaaacataagaagtggttactaaactgaggatgaaatgataaagatgtattgttaattgtggagtgtcgtatatttattaacatgaattttncagtgtgttggttgtgctttagttgatcaaacattgcacttggttctcctaccttagtgtagcatatatgttgcaattttaacgttagcacttaaacctaccccattagataatactccctctgtttcaaattatacggcgttttgactcttttgggtacataattttgttatgcacttagatataaatcatgtctagatacataacaaagagaatgaaactagagaagccaaaatgtcttataaatgggaacggagagagtgttcatgtttggaaaattccagtaattgcttcagatggttgctttgtttaggttaaattgtaaaagcccgaggcaagctgtctatgcaaagatcagaagcccttcctaccattgtaaataagttgtttcactctgctccatgtggcttatgaattgctaaagaaatctcttggtcactgtaacttttttcccaagaaatatatggaagtttccagtcccaggttttgtgttagataatttgtttcctaaattttctgcaagaaacaagtggaagttcccagtctatagtatagtttgttctagttttctggaagaaatatgtggaaatttacttcctgaagatttcgtggtagataggttgttgtgaattgcacacatttccttttgttttcccttatgaatggatcaccttgccaactacttcccttactctgcaatgttcattttacattttttgattacttgggtgcttttactagggtcaagactgtcaaagaaccctatactcctccacgtgaggtacatcgccaaattacccattcactaccacctcagaagcgggagattttcgattcacttcaaccttgggccaaggataacctattgaacctgctgaagccagttgaaaagtcatggcagccacaggacttcctaccagagccgtcttctgatggattttatgatgaggttaaagaactgagggaacgggcaaatgaaatacctgatgagtactttgtttgcttagttggtgatatggttactgaggaagccttaccaacctatcaaacaatgcttaacacccttgatggagtccgggatgaaactggtgcaagtccaaccacgtgggcagtttagacaagggcatggacagctgaagagaacagacatggtgacctccttaataagtacatgtaccttactggacgggttgacatgaaacaaattgagaagaccattcagtatctgattggttccggaatggtaagcgattaagtactattatatatcttcaaggattttgatatctgtttttccctttccttccatttatagcttttcaatgaatcatgaaatcaccgacatttgcttttgataatcatgtgacaactgttgtatagtaacatgcaatattttcaagtcgttcgattaatcacgattattcgtccaagtcggcttggaccaatcatgattaatcaagtcgttcaacttgaaaacactggtaacatgttgaagaattggagaaacggggaaaattaatgatgtggagtgagctgttttggataacttgtagtcataagtgtaatttatattttcatttcggattcgttccgcaatggatcctgggactgagaacaacccctacttgggtttcctctacacatcattccaagaaagggcaacatttgtgtcgcatgggaatactgcaaggcatgccaaggagtatggtgatctcaagctggcccagatatgtggcacgatagcagccgatgagaagcgccacgaaacagcctacaccaagatagtcgagaagctcttcgagatggaccctgattacacagtgcttgcgtttgctgacatgatgaggaagaagatcacgatgccagcccatctcatgtacgacggtaaggacgacaacctgttcgagcacttcagcgcggtggcgcagaggctgggcgtctacaccgccaaagactacgccgacatcctcgagttcctggtccagaggtggaaagtcgcggagctcacagggctgtctggagaagggagaagggcgcaggactttgtctgtaccttggcgccgaggatcaggcggctggatgatagagctcaagcgagggcgaagcaagcaccggttattcctttcagttgggtttatgaccgcaaggtgcagctttaatcaagaacgctaggcaatgtgggcatttactacgtatatcattttcagtcctggggttctctataagaaacagtctctaggttatctagcagggtagaattcaactactcgtggatctcactcggtgcaaagtagtgcaaagtacgctatctgttgttaccgtgcaagctgcagagtttggattactatgtgggcctggtggtggagaggaattctgtggggtgcctgcagccagttatgagtggcagctccatcgcaactgagttgttgtattgaatatgttacaggacctatagtaaccgaaagtaataatatggagtttgtatatcgacaagcttgctttggtgattgatgagaatctgaagtaataatatggagtttgcataaaaaaaaaaaaaaaaaaaaaaagggggggcccggtaccca

SEQ ID NO: 5020 - DNA, 866 bp, Zea mays
  misc_feature (854)..(854): n is a, c, g, or t
  misc_feature (856)..(856): n is a, c, g, or t
gggtacctcgaggccggccgggagcttccctagaacacagtggtgttctgatatatcgctccgccgctagggttttcagggatcccgcctcacaccgccgcaaggactcgcgacggacggagcaacggaggaagcaactacgcggcagccatggtgaacgttccgaaaaccaagaagacctactgtaagaacaaggaatgcaggaagcacaccctgcacaaggttacccagtacaagaaaggtaaggatagcctttcagctcaagggaagcgacgttatgaccgcaaacagtctggatatggtggtcagacaaagcctgttttccacaagaaggcaaaaacaacaaagaagattgtgctgaagctgcagtgccagagctgcaagcactactctcaacacccgatcaagaggtgcaagcactttgagatcggtggtgacaagaaaggcaagggaacctctctgttctaagcgtatcataaacttgctcagggtctcaagtatctgtcagaatttaccattacaaacaccctgtgcttagcttctgcatatgttcttttgtcacatctttttggtacgttgtagtttgtatgagaccaagctattgtttcgtgttattattatatttcatgaaattgtcaacatgaccgtttgcttgactgtaaacatagttctgagctttgggcaaacagtagtttaatttatcgtatccatcttgagactgttgtttgttcgaaatataatggtggaatgacgtcgttataagcgcaaaaaaaaaaaaaaaaaaagcttatcacttatcatccccatccgcacctctctccatctccctgctcctcgcctccttcttgatcagncnagccagggat

SEQ ID NO: 5021 - DNA, 1485 bp, Zea mays
ttttttttttttttagctacaacatttcccaggccaggtaaccctcatctagaacaaacaatgtcaacatttctcagccaactagggagcattcaagcccaagttggctgcttccattcgtacccacacaagatctattagacttgaacacatctggatcgactttttttttttttgtttcatcatgtataatttagcttccattcaaattctgagcatccttttcgtttcaaatatgcataaccagcatgctctccacacactgctgactgaacaagcacgacacacacacacacacacagctcgcgtggaaagggacacttccattcacatgggcttccacacgctgagcacctcctggaacatgtcgtgcatgagctcgcggtccgcgtggtggaagaagccgtgcatctcgtccctcacgtcatagatcttcccgaacacgaacaggtaggtgaggcaccctttcttcagccgctccagccggtacagccacgccacgtggagccgctccagcacgttgcccgagcctatgtcctccagcaggctctcctcgcagcagtccttgatgtcgccgatcccgtacttgtccgccgccgccagcagcggcagccggtgcttccagaactgcccctgctcgatcgtcccgtacacgaaacccagcagcgccgagcacgactccacgcacatgtcgccgatgtccaccgtcgacgactccttctccctcaggtcgtgcacgaacatgctcttgaacacgggggagcacgccgccagcaccgccttgtgcgccttcagcaccccgtccgtcgtgttgatggtcacgtccgcgtggatggagtccgccagcatgtgcgacaggcagcccagggcgctcttgctcgcgatcttctgcaccatgccttcgtttggccacaccgatgacgattccgtagcattgttcgtggctatcctcaggtctagaaactcaacatcaatcgtaaaacgcccatggggcatcgcatcgacttgccatacaaaatcatcgctggtacgcagaagatgctcgtgcacaggggagacgcaggagcgtcgcggcgggccggcccaggagacgcggagcaggaagcgcgcgagagggggctgctccttggccacccggccgggctccgggaagaggcgcacaacgatggagcggctcttctccaccgacaggtaccagttccagatgccgagcttaaaggggtccgaccggcggtaggagcaggggccgaaggtatcgatgcgccactgcgccagccgggagatggtctccacgcgggagtccggcccgcacgcacctccgggcccgccgccgctcatcgccggccacgagcagcagccactccagtccagggtgtggaggatttgacgacacaggcgaggagtcacctccacaaaaattgttccttttttccgttctatttgtgcaaaaactatttacgataagaatgtaaccgtcacttgatt

SEQ ID NO: 5022 - DNA, 1224 bp, Zea mays
actcgctacacatgcgcaccttggcacctcgcccctcgcagagtcgcagtctacagcagccgcgcaacctttgccgcgccctgcacaccggagtccaggcggcgcccggcccagccctcatgaatctggccgccttttcctccacccttgccacgctcccctggtatgagatgccatcaataaattcctccgcaactttctcgtcctcactgctccgccgctcgctctgcgcgtcgctccggacgatctcccacatggcctccgccgccgcccccacctccgcgcccgtcgccaccaccgagaacggcgccgcgaaggcgatagagcagcggcccgtgcaggtcgcagagcggctggaaaagttcaagacaacaattttcactcagatgagcatgcttgccatcaagcatggagcaataaaccttggccagggctttccgaattttgatggcccagactttgtgaaagaggccgcaattcaagctatcaatgctgggaagaatcagtacgcaagagggtttggtgtgcctgaactgaactcggctatcgctgaaaggttcctgaaggacagtggattgcaagttgaccctgacaaggaagtcactgttacatctggatgcactgaggcaatagctgcaaccatactaggtctgatcaatcctggcgacgaggtgatactgttcgccccattctacgattcatacgaggctacactgtcgatggccggtgccaacgtgaaggccattaccctccgcgctccagatttcgcggtcccgcttgaggagctggaggctgcagtctccaaggacacgaaagcgataatgataaacacgccgcacaacccaaccgggaaaatgttcaccagggaggagctcgaatccatcgccgccctctgcaaggaaaacgacgttttgctgttctcagatgaggtctatgacaagctggtgtttgaggctgaccacatatccatggcttctatcccgggcatgtacgagaggacggtgaccatgaactctctggggaagacgttctctcttacaggatggaagatcgggtgggcaatcgcgccgccgcacctgacatggggcctcaggcaggcgcactcgttcctgacgttcgccacctgcacaccgatgcaggcggcggccgcggcggctctgagggcaccggacagctactacgacgagctgaagagggactacagcgcgaagaaggctatcgtgc

SEQ ID NO: 5023 - DNA, 5121 bp, Zea mays
  misc_feature (599)..(599): n is a, c, g, or t
ctgatgccctgaacattgttccctctgtagggtactcactgttctttatttttgtgcatgttattttgttgtttactgctgctgtgagtagttatgcacacatgcatatatctgtcatcacgtttattgtgctatattttttattaaattgaatttgaaaatgcctaaattcctaacattcactaccgcgctcatctgagtaggtcactgttttgggcaatttcggttgtccattttgtgatctgtttgttttcttgggctcgtgtatactctagaagcttttccaaacattccaatcgctagctgttttttgcgtttttggtttgatcatcttcttgatttccattgaagtaaagagccaagtttagcattttggagaggtttatcccttgaacttattttgatcattttgtgtgcttcgtggtgtttactagtcatcaccgagaacatctagcctcataagaactatcattatgactagcaacaccaacataagaattcatagcacttgcaaaataattattagaattataagatatatttacaagttgtacttgtacctcgggctaattatagtagtattatggtgcaacaccttngtactccatgaacatgatcgtcttgctaaaattttgagtgataggagaaacgcgttacaaaaccacaaacaagatcataagttgtcaaaaccagatgcgatcaaacttttgggctagatgtgatggtaatggcaaccacatgaagataaatcaaagagattcagctataaagtagagctaaaacggtcttcccaaacaaagtagccaaaaagtgtgttcacgcaaagatcgatcatacactaactctgactaaattgcccgagctaccatagatcaaagaacacatgaggtaaccaacataattttacggcgaagagcggcgaggttcacaagcaaatcagcaaaagatagttatcacatttatgtggccaagaacaactagttctcgagcaaactagcagaggaaccgtcgaagctctcatacgaaagggaccttgtcaaggcaaggacatcgatggatagctataggtccatcaacaagactagggcgtcgaatcaaacgataaacaacatgaggttgaaatagattagagcaaaatgaggaatatatgtaaaaagagcgattggatgctagcttactcaatcggatatgatcatccaatatatatacatacatagagatagaaagagggagtaatcttatctattagaaaacctttccaagacgtatttttcaagtttttccatgagtttaaaacagttcatatcggaatccaaaaggtcagatccaaacatggtctttttttatatttgtcgaaagttcggacgtccatcgcaacttttgaactccgttaggacttcgggcatgggaatgatcctagacattgaaataggtttttgaaaaaaaatggatatgggtcagaattttttatgttggagtatcttttcgagagcgtaactcatttatttagactctaaatcgtatatatatttcgaccatctcaacaagcgactctgaatggtgagactcagttcatattttaataataacctcacaaaatgtttttttttacaaaatgaccaattttgtcaccgtatattgctgtctgggcaaatgcacgatgcttatctgtttccttgtgggggtagaggcagatgacaaggcgatgagcatttatccggtccggcatcacagaatggaccacggagattgcaagatgcaataactgaaagtggaccatgaatctgcgtctcattgacggatactccgatagcgaccgattctgattattggaaagtaaattcagaacggtaggtcctgatgactcgatgtggatgggcttgttgtatcattattgaactccagaagaagttttacttccccgtgaagcaaagctgatcgatgtaaattactccggcagcagtagtagtcctcttgtctttggctgcccgtctgtcttggttgactctcagtttcacgatttcatcctagacgtgcacaataaataaacttgcataaacaattcaaagtgccctgtgaatgactcggttaattttccttgggcagttgagcacttgagcatgagctgaagggcacaagaacgttgacaagctcgaatctcgaagctgtagattcaagaaaaccgaacccaaccaaccgccagccttgacccacgcgacgcgatccccgagctcacgccgtggcagcgcatgcatgcacgagggtccaagtcatcgccggcgccctggcccacccatcgcccatccaacggccgcccgcgtcgcgacggacactgtcagcttccgatccgcgtggcacgagaccattacctagaacatcctaatcgaaaaagggctctacttggacggggtgaggagaggcgaggagagcagagcaggcagccgacgacttccccacgcggaggcgttgcttcccggtcgtccaacgcctggcatcccttccttctcctcacccagcagcagccggtcggcctcggctagatctcgccggccgcctccaattggttgtccactgtggccgggccgaggggtacttatctataggcccgcagatctgcgcctgcgcccgtgggaatctccgcacctcgctatccgtctcttggatagatcgatcttccgtcgctggttccccttcgccccacacgagtacttccaaggaactggaacttccagccggcacggggattcgagcttctgctctatcagcaactccactgggcgctgagggtctgtagcagagcggtgcgatcggggcagaagggagccatgatgagggggcaggcgtggctggcgctgctggtcgtggtggcgctggccttggcggacgcggcggcggggaggttcgtggtggagaagaacagcctcgaggtgacctcccccgacgagctcaagggcaagtacgagtgcgccatcggcaacttcggggtgccgcagtacgggggcaccctgcacggatgggtcgagtaccccaagtccaaccggaaggcgtgccagagcttcgaccagttcgacatctcgttcaagcccaagcaggctgggggacgacccatcttcgtcctcgtcgaccgcggagaatgtttcttcacaaccaaggcatggaatgcacaaaatgctggagctgctgcagttcttgttgtggatgacaagtcggaacctctaatcacaatggacaacccagaagaaggcaaagagcacctagaaaacatcactattccctcagtgcttataacaaagaaattgggggaaaaccttaagaaatccgcggaaaatggcgatatgctcagcgttcttctggactggagagaatcccttccccatcccgatgagcgtgtagagtatgagttctggacaaacagtaatgatgaatgtggtcctaaatgtgatatgcaaatggacttcgtgaggagctttagaggaactgcacaaattcttgagaaaaagggttacactcagtttactcctcattatatcacatggtattgtccagaagcttttgttgatagcaagcaatgcaaatcacagtgcatcaatcatgggagatattgtgcaccagacccagatcaggattttagccaagggtatgatggaagaaatgttgtggttcaaaacctacatcagatttgtgtattcaagattgctaatgagactggaaagccatggctgtggtgggattatgtgcatgatttcgcacttaggtgtccaatgaaggataagaaatacaataatgactgtgcccatgatgttatcaaatcacttggattggacatcgagaatataaacaagtgtgttggagaccctgaagccgatgtggaaaatgaaattctaaaggcagaacaagatgcccaaattggtcatggtaaaaggggagatgtcacaatactaccaacccttgtcatcaacaacaagcaatatagaggtaagctggacaaagttgctgtcctgaaagcgatctgttcaggatttgaggagacaactgaacctgctatttgtttgagcgaagagattcaaacaaatgagtgtttggagaacaatgggggttgctggctggacaaagctaataatgttactgcatgcaaggataccttccgcgggcgtgtttgtgagtgccctattgtgagaggtgtaaaatttgttggtgatggatatacccattgtgaagcttccggtgttggtaggtgtgagatcagtaatggagggtgctggcaggaaactaaagatgggaaaacaatctctgcctgctcaaacgaaatatctgaaggttgtaaatgtccaatgggtttcaagggtgatggagaaaaaagttgtgaagacattgatgaatgccaagagaaactttattgtcagtgcaagggttgcagctgcaagaatacgtggggaagctatgaatgcagctgtggtgatgacaatatgctatacatgagagagcatgacacttgcatcagcaaagagggaactgccactactgttggctggagcttcctctgggttattttctttggacttgtttttgccggggttggagcatacgctgtgtacaaatacaggctgcggagttacatggattcagagatccgtgccatcatggctcagtacatgcctctggataaccaagaaggagcaaaccagcatcaggtcgtgcacgccaatgatatctgaagctgcactccttttctgaagcagaaatagagggggcgtgcaacatttcacttgtgctgctgcatcattgggtcatgggttttacaggtataggtcaactaggctcaaagatacacaggttatgcgagatcaagatctactgtaccatgaattaagatttaagagagagacgttgtgcgcctcttgttacgacacttgatgaacagcatagggaatgataccatcatagttttagtagtccttcgttgccttcagtttgtcttcaaagagttcttgttgcctcttcacatacatgtaaacactgtaaataccgttacctgaataaagcttcagcctgctaggctacaagcagggttcactgtacgtgtccgaacatgtgatttattacaaaaatctttcaaaaaaa

SEQ ID NO: 5024 - DNA, 1755 bp, Zea mays
aattttggcgtgctttacttccgcttccaatataccttttttctgcgacaaaaatcatttttgttaattgcgaaaaggaaagagcccgtgtgaacaggaggggtgaggagaagagggggaaaagagagagaaatcggagggcattagcaagaaaccatgagttctaggttcgcaatccctagtcgtcttgtcctgatcttacttgagtgctcgtgagctctttccagtggctaaagactgcagatttgagttctggcccaagaaccgcgtgctagcccgccatggaggtgaggtccgagcaagggctgatggcggggagggatctattcggcatgccgaagagcccgccggcgcccgcgccgccgtcgtccgccgccatgcagagcgtgcgcatggcgtacaccgcggacggcaccgccgtgttcgctccggtgagctcttcgcctgcgacgccgtcttaccagccgcagggcgcagcccacggcgctagcatgtccgcggcgacggtcgttggaggcaatggcgctccagctgcgccgagcatgggtgagccgctggccaagaagaagcgcggacgaccaaggaagtacgggcccgacgggtccatggcgctggcaatggtgcctgcttcggcggcttcagggtcgccggcgacagggcagggtttttctgggccgttctcaccgcctgcgttaaatccggcgagctctctggtggtggcgtcgccagacggattcaagaagcggggccggcctaagggttctaccaacaggccacgcgtggacgctgctgggtcatcaggagctggatttacacctcatgttatcacagttcaagctggggaggacgtggcatcaaagattatgtcattttcccagcatggaacacacggagtttgtgttctttcagcaaatggctccatatcaaatgtaacgcttcgtcagactgctacatcaggcagaactgtaacatacgagggtcaattcgagatactgtcgctgtcggggtcattcttcctggctgaggatggtgtccagcgcagccgaaacggaggcctcagcgtgtcgctggctggtcctgatggccgtctgttgggtggtggggtcgcaggacttctagtagcggcttcaccggttcagatagtactgggaagcttcaattctggaggcggaaaggagccacaaaagcaggctccttcagaacctacatcggctccaccgagggttgctccgacagctgggatgggaggacccagcagcccttcttcaagaggcacattgagcgagtcatccggtggcgctggaagcccaccgccactgcatcgagccatggctgctagtgctagcaatagtaaccagccaccgttcttgtccagcatgccttggagatgagtttgcagcttgcattctcttggccaattccaggcaggatgtagcaatctgcgctttcagtagcgcccgttgtgtgagtagctgtgtgcagtacaagccagaagcttgggtgggaatagaattgcgtctggtaaatctgtagctctgttgtaggttccaccctgaattcctgtgctaggtgtgttgagctgtgtaagcaatgtaatcctttcagcgttatcaaatgctatttagttaaatgtttctaccaaggcatgtcgatttgaatcataagatatcaatttgctgtttgcgtctcggacaacttctgttctagagaacgttctactcactgaaatttgagcctgttgccaagtttgaaaac

SEQ ID NO: 5025 - DNA, 6067 bp, Zea mays
  misc_feature (2557)..(2557): n is a, c, g, or t
  misc_feature (3067)..(3067): n is a, c, g, or t
gctcgtgttgtcggtcctgcattgtttgtatgggagtgatgccctcatcatcctcccccacttgaattagagtcatcctcgactcaggcggtggccaagggggtggccgagcaaccctaggatgtacaaagcctttaggcccaaaaacatgcgtcgctgatttctagcagattctggatatcactttgttacaatgattctgataagccttgagattattttgatgtgggatcaattgatttggaaagcttatatccttagctttccaacgatgtctagaatgtctaaaatatggtctatatgtggcctgggcgttcatttttgtgaggaccactcctgcaacccaaactggattcgtgaataaactggatttcaactccccttgagtttggaactctattattgattgggcctttaccatatagttgacgcccatgtactcatcacaagtggtcaccaagctaggaagggtttacagagttacacaaataatctttggtaatgcatacatgttgcagacattgcaaggtgatgagttacctaagacattgaatggtcgtttcctagaagcaatatcatcctagtgtatgacaagatgcttaggaaactgatgctcgcacatcaagttgctaatggcttgtactagatgcttttggttcgctgatctttcctaaaggcaaggcatgtgttgaccaccatatgtggcacctggagatgtcggacggttcggccatgtggcctggacggtccgtgccccggatagtccgcgaggtagctcggatggtcctcgatcagattaacttaggcgagaaaacccatgtttccatgcgtgcttagccatataatcatgtgggtttatttggggaacgcctaggaatgagtcccgacctccactatatatatatatgaagtggtacgacttattggcgtataacacaatcgatccaaaccaatacaatctactttatttgcttcgttcttcatcattctaggagtaggagtaatttaggtctagattagcctttcccaaccccaaatcttcatctctatccgactctatgttgtatatggacgtcccgggcagcctaccgaccttaggcaccctctggaactctcctccatgacggggtccctcgcaaggggcgagttctagggttttctgaggaggaaatgactctgtgccatcgcggaccgtccaaagcagcgcagagaggagacactcctgcagcaaggtcatggaccgtccgatccttggccgtggaccgtccgtgttttcgcagagagcaccgcttgacggttcacctctagtgtttggccccaatcggaaccaacacattatttattaacttctccacgtcgttgaagcagggataaagattcaacaaggaacatttcctcgatgttagagatggaaaatgttaggtggtgagtctacttagatagtgataggacgcgaatcatcgtgagtccataccgtggagaatattttttagagaaatgctcttgtggagaaggctaagaagtaggggtggatacgacctggctcaactcgttaagtaactgaaccagagaattagctcgatttggctcgtttgcaagcttgagctgactcgtttagctcgcgaggtacaacaaaaaataatatgcatatccatataacaataaaatcatttgctagttaattccaaaccaattaaacaccagaaaagagtaataatgcttaaaattttatataccaagtctttcaataccaaattaataatgttcgtcgcttattagttcatccaacacaagtgtaggttttgttttgccgataaatgctagctcattcgaaccaacgagcttggctcgagctcgactcgagctggctcgtaaataaaccgagctgagatgctagctcagctcatgataaaattgaaacgagtcgagtcaaaccgagctgaccacgagtcgagcgagctaacgagccacgagtattttgtccagccctaccaagaagattggtttagtgatccaatccatgatgctaacaaaataaatagggtagattagaataaggttcaaatgatttcatattttctttggattttgaccgtggcttttgtcccccacaagttcaatcaaagagtcaatccaatcaacaacttttttcaaaaactgacttctcacaatgcaaaattgaaataacatctagacctacttttagtagtttttcggatggaagaactctgtaaatatacatttaaaatttttagtggcttgtaacggctttcaccaaacgacttttagcttttttacagctcataattcacaataaatttttcacaactcataattcataaccacctttttatagtcatagttcaaccaaacagacctcaaacacatcatgaattcctcattaccgtcctaggtgtgacacttctagttttaggccttctaaagccgtgctcagtagcgtgcatatattcatataaaacacaacactgttttatgttgtagtctgtattatttatatagtgaaatttaaaatagagaatgtgataataggtgaganaagaaggttattagagataacctgaacatttaggcccgcattggcctgctgctgagttttgatcgatgagttgtgggcgcacctgggacagaataccctatctcggtctgcccatgtgaaaaaaacagaaaagcaagcagcccaatcagccccaccaagaaaagccgaagcccaagaagcccagtgagcaccttctccactaggttagtctttagtacacggtcagccgcccgagccgggtcggagttgagcacttccccttctcctacccttcacctcccgtttgcccgcagccgccaccgcgtccccaagcactccagcgcccccgtccccgatcgacgccatggtgtcggaggccagcaagaagaaggccgcccagaagaaggccgctgccgccgcaaagaggggaggcaaggcctcggtggcgtcctcgtcgtcttcatctgcggccgcggccgccgataaggtggcgaacggcgtcgtggcgcttaagctatcagaccgcacctncaccggggtcctcgcatctcaccccctttcccgggatatccacgtgagcactcatttccgatcgaaccctcgtcttcctattctttcgtgattcgtggtgtgaatcttttacactcccgaacttaccctggacgcggaggacctagcagttaaacagtttattttttccccatactacgccacgtcagatttaggacgtttggagtcgctgcttccatcgatctccagagatctcttctgctctgttccacagcaaaccgatctctggttttgatatgcgcactgacctttgttctctgaattagattattgtttattttattagatatcgttgccccaagagggagctcaccagtccccccccccccccaacgggtggaaaattagaattatgtgttgtttgtgaataaagataggcatataaagggacaaaattaacgaatctctctgataatccagtatcattgaatattatgctatatatctgaaagcagaggtcagaaaaaatcaatcgataacgtttctctcgtggatatcttgcttttactttttttaatttggctggaacttctgctcgcactttttaactcttcctgcctctagcacaatctctatatcctgtcgcaagtactacatataccattgatcattgccttcaatgcatcgtggtccaaaataaatggatctatgtgcatcattgaaattcaacgaccatgtgaatggtagtcagttggcagatataacttggagcagactgccttgctaacagttccatgtgaagttcaagtttggattctgtgtagattgttactatgaaatacaggcagtagcttttttcatataactttttcctggcacttccttttgccattataatgaagtgagaaagaggtctttggcctcttttaaatttgaactcttgtttctatttttgggtgctgcgtctcctgttaatttgtttagccctttgctgattagtgatttcttagttccctagtaatatatgttttggatgttgcagatagagtctctttctttaacattccatggacacgaccttattgtggattctgatttggagctgaactacggaaggtaaacacataaatacataatgctaccattcagttacgagctggtatgctcttggagcatgtcacttgtaccttttatctgttatatttttatttgatatatcaggcgatacggtttgcttgggttgaatggctgtggaaaatctactcttctcacagcaataggctgcagagaacttcctatccctgaacacatggacatataccatctaagccatgagattgaagcttctgacatgtctgcactgcaagccattgttagttgtgacgaagaaagagtgaagttggaaaaggaagctgaaattttggctgcacaggatgatggtggtggtgaagcattggagcgtgtttatgagcgtctagatgcaatggatgctggaactgcagaaaagcgagctgctgaaattttatttggtctgggttttgacaaacaaatgcaagcaaagaaaactaaagatttctctggaggttggcgtatgaggattgctttagcaagagcactgtttatgaatccaacaatccttttgcttgatgagcccacaaaccatctagatcttgaggcttgtgtctggttggaagagacactgaagaaatttgaccgcatacttgttgtcatatcacactcccaagattttctaaatggagtgtgtactaacattatccatatgcaaaacaagaagctcaagttatacaccggtaactacgatcagtatgttcaaactcgctccgatcttgaagagaatcaaatgaagcagtacaaatgggagcaggaacagattgcttcaatgaaggagtacattgctcgcttcggtcatggttctgcaaagcttgctcgtcaggctcagagcaaagagaaaactcttgcaaagatggagcgaggtggtctcaccgagaaggttgttagggacagagttctagtgttcaggtttacagatgtaggcaaacttcctccacctgtgctgcagtttgttgaagtcaagtttgggtatacaccagataatctcatatacaagagtcttgactttggtgttgatcttgactctagaatcgcattggttggtcccaatggtgcagggaagagcactcttctgaagcttatgactggtgaccttgctccattagatggcatggttcggcgccacaatcacctgcgcattgcacagtaccatcagcatcttgcggacaagctggatctggacatgccggctctggcttacatgatgaaggaataccctgggaccgaagaagagaagatgcgagctgctgttggcaggtttggcctatcaggaaaggcgcaggtgatgccaatgaggaatctttctgatgggcaaaggagccgtgtcatctttgcatggttggcatataggcagccgcaactgctactgctcgatgagccgacaaatcatttggacattgagaccattgactccctggcggaggcactgaatgagtgggatggtggtttggtcttggtgagccatgatttcaggctgatcaaccaggttgctcaaaagatttgggtgtgtgagaatcaggcggtgacaaggtgggaaggtgatatcatggatttcaaggcacacttgaagagcaaggctggtttatctgattagagggctttttccagcaaccatgagctttttaactctgtatcacgaagtcccagttttccaatagcgaactatcagagttactttattgtatcggatttcttttgacttgcattgcaacctgattaccttatactacctggaatatttatttatatatcttttgaaatgctattatgtgtaaagttaagtttcgtacccggtgacccctttgatttgtcaaagttactagattctatgatcattgtgaacatacaacttaaatttagttttcaattcaactgattttatttcttcag

SEQ ID NO: 5026 - DNA, 1975 bp, Zea mays
gcacgaggcattaaccgcgctccccacacgccctaaccattcccggctcccggcagagacggccgctcgcctccagaagagcaacccaagtcgccgagagtgactcccacacgacccacctaccccgccgccgccgccgccgcatccccctcgattccgtctggcgatcgggggctcccagacacatcacagatacaccacgccaagccaaatcgagcaacgtctatcatcatattataatttcccctcattcatctcacagtcccaggcctcccctccctcctcccccgtcgccaaccaacctccaacccccagccgatcgcgtcggagatgctgggcgtcgcgcggaggcggctcggatccggatgcgtgctcgcccagctggcgcaggccctccgccccgccgccgctcccgccaggacctactccgccgcggccaaggagataactgtacgggaagcattgaataccgcattagatgaagaaatgtcggcagacccttctgttttcttgatgggagaagaggttggcgagtaccaaggtgcatacaagatatccaagggtttgcttgacaagtatggccccgatagggttctcgatactccgatcactgaggcgggcttcactggcattggtgttggtgccgcttaccatggtcttcgacctattgtagagttcatgacatttaacttttcgatgcaggcaattgatcacataattaattcagctgccaagtcgaactacatgtctgctgggcagatatctgttcctattgtctttaggggtccaaatggtgctgctgctggagttggtgcccaacactcacagtgctatgcagcttggtatgcacatgttcccggattgaaagttctagctccatattctgcagaagatgctcgaggtttgctgaaagcagcaatcagggatccagatcctgttgtgttccttgaaaatgaacttctttatggtgaatcatttcctgtatctgctgaggtacttgattctagcttctgccttccgattggaaaggctaagatagagcgacaagggaaagatgtcactatcactgcattctccaaaatggtgggatatgcccttcaggccgctgatatactggccaaggaaggtatcagtgccgaggtaatcaatcttcgctcaattagaccgctggatagagctactattaatgcatctgtgaggaaaaccaatagattggtaaccgtagaagaaggcttccctcaacatgggattggtgcggaaatatgcatgtctgttgtagaggacagctttgagtatcttgatgcaccagtcgagaggattgctggagctgatgtgcccatgccgtacgctgccaaccttgagaggatggctgttccacaggtcgatgacatcgtccgggcagccaagcgtgcttgctacagggcagcagtaccgatggcagcaaccgcctagtccagcagaaccctgcatgttgcatttctttgtctaattttaatgtccgtgctgcagaaagacgtgtcacataatggtgtgacgagtacccactgccgctgcaactcaactatagcatgagctgagtttttgtagagccaccgagaggtgttcagtactccagttccagttccgcttatcttcgccgccgcagccggaaggctgcgcatgactctgcgtctgttttatggttcacgaatgattgcagatttgcagcagagcctctggagatgagaattttacttgtggcgagatgttgtgagtaacttgtattcagaagggggaactctcaagagatcctcaagtcgtgattccagttgcggctttcttgatagtaacgtactccctccgttttttagttgtcgctggatagtttaattttgcattatccagtgataactaaaacaaaacggatggagtacgtatttaccatgctagtgctagaggatcttttgttcctctgcagggtgcagcagtcactgcg

SEQ ID NO: 5027 - DNA, 2018 bp, Zea mays
gcacgagaccattacctagaacatcctaattgaaaatttcttttgagaactccccttctccgccactaccgaagcccttgtacccctcaccgccgccgctgctgctagggagcttccatccgcgcgcgcctacaacgagagctagcagcggtagcggccgttatcttgtcgctccggctccgttcgtgtacccaagtcccagcctagatgccgcagatggaggggtccactgatcagatcgccgccggctggttcgctaaggagccggcttccgagcggcccgtgggcttgccgaggaccggctcttccagtcgcctcaacgcgcaggcgccggagttcgtgccgcgggggccgccgccaccggcgccggcggttgtgctgccgcctccgccgcaggtgatccgcatgttcgccgcgcctcccccgccgccgcgtgggggcttcttctccgcgccgcagccccggccgttcgagtactatgcgcctatcggtgaacgcagcggatttgctgccaaggagcaacaggcgccggagctggaagcggagatgctcccgcccgccgcggtgaagacggagcccggtggtggatgggctcgacgacgaggtggtgcacaagatcaccaagcaggtggaatactattttagtgacatcaaccttgctactacagaacatctgatgagattcattaccaaggattctgagggatttgtgccaatatcggtaattgctggctttaagaaagtaaaaacttctgtgcgcaataatgtgatgcttgctgcggctctccgaacctcatcaaaacttgttgtaagcgatgacggtaagagagtcaaaaggcagcagccatttacagaatctgatttgcaggagctccagtcccggattgttgtagcagaaaatcttcctggtgatccctcctaccagaatcttaagaagatattttcagctgttggaagtttgatttcaatccgaacttgctatcctcagactccaaatggcactggtcctgcaactaatagatcttccaagttagatatgctttttgctaacaagctgcatgctttcgtggagtacgaaactcctgaggatgctgcgaaggctattttggagctcaatgatgagaaaaactggagaaatgggcttagagttcggttgctgaatacttgcacggtgaagggggcaggcaaaggaaaaaacggaatgaatgaaactgatggaaatagtgaggaggatgtctccactttgaaccattctaacgagaaacagtttgaacaatcctctcaactgttagatgtactgccggaacacttgtttgatgagaatttcaacaaggaagttcccaagcgcggcaaagggcgcggtcgcggtggcagagggcatgggcgtggcaaccatcaatataacaatcaccatcacaataaccagcaccaccagaacaaccagccgcagtacaataaccatggcaacaaccaccttggtgggaaccgtggcagccttcactctgttggaactacaccgcataacctgataaccaagcttgagccgcatccgcacctgcctattggggccaacaagcttccaccaggcccccgcatgcctgatggcaccaggggtttcaccatgggcagggggaagccacaggctgtgctacctgggttgtgtgctgttggtgttgagtgaggcatgcagattgctgctcgtatgcttgtattgtatatctttgtggtgggagtatttgtgcgtcacactttgtggacacggcgagctgtcaaaaccagtatattacaatcgctttgtaatcgtgtatctgggcaatttggtcggttggcacggggtatgaatcaattttttttgaattcagtatctatcatagaaaaggacaagcacactaaaatgtagcgtggtgatttagtctgccctcctgttgcgtcattttgttgtcatttcctaaagcagtgacaaatagttatttttctgtcggctgttggtgacgttacgctgaagtatagggtgtgtt

SEQ ID NO: 5028 - DNA, 4954 bp, Zea mays
  misc_feature (1029)..(1029): n is a, c, g, or t
  misc_feature (2109)..(2109): n is a, c, g, or t
cccctgccacgtatgaaaatgttggcgccaaagaaggtggcgccactatatattacctcggcaccaatgatgatgacgccgaactaatggtctattttttgaaatgaaactgctaagggtatagttgtgaaaaaaaacaccaaaaaggctaaaatgcaaaaaagttggccagagaggtgtcttctgcaacacaggattttcacgagagccgcacaaaattttttacaaaaatatccagtctaaattcataggcaacaagattttaaaaacttccccacattccaaaggatcatccaatactcgggctgtatcgcgtgaacgaaattacaatattgatttgctggctgggtgaagctattgcatcgaacactataaaatcattattcagataactataaaatattctcagaaaaataaaaagttcgcaaacaagatggaaaaagaaaagaaaacaggcgtagaaagaagacaaacgagagccagccaggtgttctctcgttctccggatgactctccagtggcacatagaaaacactagtactgtcccctcccggacatcagagacagacacagtagagacgaggcagaggcttctagatctactgccagctcggcagcaacaaagccgaagcgtctcgcgtgcgcggccgccaccggggattagggatggcggcgaagaaggtgctcatgctctgcggcgactacatggaggactacgaggtctcttcctctctccccctcttctcgcgtcgcctcctgctgaattacatgtattttggatcgggaatcagccctcctgaaacaaaatcggttcttgaattgatgctgggttaggtcatggtcccgttccaagcgctgcaagcgtatggggtgtccgtggacgccgtctgccctagcaagaaggccggcgacatctgccgcaccgccgtccatcagcgggcccctctccaggtaccttggattgatatccctgtgctctctttttattttttgcgtggaagcgttccgttggttagggttagttatgcngtcttgcttctggtgagatcagttggaccaaatgaagttgtgtagaaaacttgttaggtgttcattagattgacagtgaagagtagaggcttgcataaactagttggacactgcatctgattagaaaacttgttaggtgttcattagattgacagtgaagagtggaggctttaatccataccggcttctactacttcttcagtgtttttgtcgatatgaattgtagctgcagcagtccaaacagtcgtctttaatccgaagcgaacaacactttcgcagtaaaaaaacttgtgtttacttgcctgaaagaagcaaactgtcatgatccatgactctgcagagattgaaaccaacaaggcaatcaccatggcatctcaaagcataatgccaaagtatatacagacaaactactcgtgcataaatgcatcatacagagatttgtttcattgcaggcacaaattgatcaatgaatatcatgttgttagtaaggaaactaatactccctccgtcccaaaatggtatttgttttagggtattaatggattcatacaatatttgatgcatgtgtattatatttgtgtctagattcattgttattcatttcaatatggacaaaaaaagataggaattctcaatgtaaatagaaataatagatgtatgagtacaaatgtgtttaattgagtttgcttatcctgttaacaaaaagtgaactgtaaatattagtctatatgtaagcgtatgtttcaaaaatatatataactgtctctgtacagcggtgaagaggtataaagtaatcaataccacagtagcaatattaatggttgacgtagaaagaatacgtaagcctacaaatatttatccgtcggtcaaaatccattttggctttccccacccggtttccagaaagcgcgaggacacgcccgtcatggctcctacatcaacagttcagcagccgccgaatgcagatccaacggttgctatttaaaaggtgacgtggctgcgtttggttgtgcagaggctttactatgtaaataattatccttgaggccatggtggtattgtagatcaataacacttccntgtcatgcttctcttgcttacttcttgtggcatctacactgatatggtttggattaacagctgcaagaataaacattctctcattcgcatatttcatgcagacatactctgagacaaaaggccataatttcacactgaatgcttcatttgatgagattactgctagtgaatatgatggattggtaattcctggagggcgtgcaccagaataccttgcgatggatgaaaaggtgcttgacctagtcagaatgttctctggtgctaagaagcctattgcatcagtttgtcatggacagttgattttagcggcagcaagagtagtcgagaaccgtacctgcacagcatttccggctgttaaaccagttttggttgctgctggtgccaagtgggaagagcctgacacaatggcaaaatgcactgttgatggcaatctcatcacagcagcgacttataattctcatcccgaattcatcagcctatttgtcaaagcactcggaggttcagtggcaggctcagataagagaatactgttcctatgtggggtatgtattgagaaaaaaaaagatgtgtttcttaagtgtttcacattcttatacacattttaatcacacactgcacgatttggatgttgttttttttctaagacattgtgtgattaagtgttgccacattctactgacattgtttttttcttaattgcatgattaataggactacatggaggattatgaggtcatggtcccattccaggctctccaagctcttggctgccatgtcgatgccgtttgccccgacaagggagctggggagacgtgcccgacagccattcatgatttcgaaggtgaccagacctacagcgagaagcctggccacgattttactctgacagcgtcgtttggaagtgtggatgcttcgagctacgacgcgcttgtggttcctggcggacgggctccagagtacctggctctgaacgataaggtcatcagcttggtgaaggccttcgcggagagcggaaagccaatcgcgtcgatctgccacggccagcagatattatccgctgccggagtcctcaaggtatagctctatcattgtttctgcggaatcctgtttctgttggtaattcgatgtgccctttgatctgctggtgtttcttttggtccatgtgtttctactgtgtggcctagcagactttgctgtgaacataacaaaaacaaatcttgctagttttctgccgtccaggaaggatggtagtcagtgcagattaatggctgccccatctgtccgccgtcggatgatcctccttagtcattggggttattactagcaaatgtagtatctggttttctcggaacatctgacaactttggtcgactgacgtgcgctgacgctcccttggttggtcggtcgacacgcaggggaagaagtgcaccgcatacccagccgtgaagctgaacgtgttgctcggtggcgggacctggctggagcctgacccgatccaccgctgcttcaccgatggcaaccttgtgaccggcgcagcctggccaggccacccagagttcgtgtcccagctcatggcgttgctcggcgtcaaggtttccttctgaagtccaaactgaaagggcaaggcagaaagagctctggctcaacctggggaggggcgtgatagcatagctttggatttccagatagaagagaacagactcaaaacgacaccttatagcgatcgctgcacttaatccttgttccatgcgcagcaagcctcaggcttattacccttgtttgtcagcgttgtgtaaaaactgtaacccggatgctgtttcttcttcttcttcttggttccttcttttttctgagtcgtcctttgtggattcaaataataaataaagtcttgtatactgctgtttgttgatctggtactgtgcttcgagcagctagatggccaacaaagaaaatagtggctctgttatgttactgctacagtgagaaggtcggagacagaaagaatgccgcaacttggccccaccaccaggccatggcagcagtgcagcacagagcgcgaaagcgaactgactggacccgatctttgcactccctctcgcaaaagcgaggagaatctggatgcggatgggggccgtcgccgcctcgctttttcaaaaggccatcacggttgccacttggaaaacgacggcggcggccagtgggaccggaccgccccggaagcgattcagatttttttctttgtttgtttttttttttttttgtaaaaaaagcaaagaacaacaaaagctaacgaacgcagaaaaaagagggatcgaaaggaaagcgagaagacagcgcggaatggcagaaacgaagaacgaacttggcaagagcaaattcagatcagatcgcgttcacctgtcctgcgttgtgccaagcgcgatgatcgacataggattttagataatcttccgtgcctttttttttctcggtgcatgaatggcttcagacaatgtccggtcccgtgtgttccgtggatgttgggtgttggccaaatgcatgagccacaccgaaaatcggaatatatcttagctactgtcatcaacagagatggtcacatgcaacgctagtagcaagatgtgtgtaggtccatggccgtatccgtacagccgtactaggggtgtataacgacctcagctcgttaagttaacgaccacagagtcagcacgagctcgagctagcagaaaaaataatatatatatatatataataattaattttagttaattttaaactaatttaacaatagaaaataatgattatactcatagtttcacaaaccatgtcaatataacatcaaattagc

SEQ ID NO: 5029 - DNA, 1506 bp, Zea mays
tgggtacctcgaggccggccgggctcctgaacacaccacccctcgtctccccacggaggccgtcctctcctctcctctgcgtccgccactgcccaccgctcgcccgcgcgcgctccattacctcggcgggcgatggccgacctatccaacaccggctccacctaacacgagcagcgcccccgcctaggcggcagctggctggtcggtcgtcgagcagctagcggcggcagcgcccggagggaggccgtctcactctcctcgtcggggcggcaggagatggaggccatcgtgggcgtccgcgcgccgccgcgtggccgtgcctgggccggcctcgagaagccgccgcgcgccgcttgctgcgccagagtcccgacggcgaggctcgcggtcgcggcggacaggccgcggaggctggtgctgctgggcgccgatacgcggagggccgcggatcctgccctccgttgcgccgcgcaatctgcaggaacaggaaaggtccactactctgctgatgacgctctcatactacagcaaaaagcccaggatgttctgccttacttggatggccgttgcgtttatcttgttggaatgatgggttcaggcaaaactacagttgggaagatactatccgaagtgttaggttattcgttcttcgacagtgataagttggtagagaaggctgttggtatttcatctgttgctgagatctttcagctccatagcgaaacattcttcagagataatgagagtgaggtcctgagggatctgtcatcaatgcatcggttggttgttgcaaccggaggtggtgcagtgatccgaccaatcaattggagttacatgaagaaagggctgaccgtatggttagatgtcccactggatgcacttgcaagaagaatcgctgctgtaggaaccgcgtctcgaccactcttgcatcaggaatccggtgatccttatgcaaaggcttatgcaaaacttacgtcactttttgagcaaagaatggactcgtatgctaatgctgatgccagagtttcacttgaacatattgcattaaaacaaggccataatgatgtcactatacttacacctagtaccatcgccattgaggcattgctaaagatggaaagttttcttaccgagaagaccatggtcagaaactgacctcttgaatgagagggaaaggatgctgacaacatgtggcccttgtttgtttaattgtacatatacctttgcattattgcctaaactctttctacagtgttgttggattattgtttgtgcagcatgaaagaggaccgtttgagtttgtatttatgcaaatgaataagtaaataactttcagttaaaacaatgacaattcgttatttatcgcaaaaaaaaaaaaaaaaggacattagggcattagcatggtactgtcatttcaatattcactatgtcagatatcagatggtgaaacaagaaaatgacatgaatccatgctttcgaggcaaattgcattacagaattatttct

SEQ ID NO: 5030 - DNA, 2039 bp, Zea mays
ctcacgagaccgtccaggcgtccaccgcgacgcgctctcctgcccgtgcccacctccacgactccacctccgcagcgcccgcagtaacctccccacgccacgccacatcgcgtgcgagccccaaccgtcgccggcctcccaattaagccgcccccgcggcgcgatccggtgtccaccgctgctccgccggaggagggggaaggggaagaaaagggagggggggagcacagggggatgctagaggcgaagccgccgtcgccgggctccggcgcggccggggcggcggcgcacatccacggtcaccggcggtgggcggcgccgctgctggcctcggttctgctctcgtcgctcctcatcaccgcgtcgctcttcttttcctcctcccgcgcgctgctactctccttctcgccgctcccctccgcggcctccgccgagcctctcttcgtcgaggccaagctccgccagcagatgcgggccgaggagcgccccacgcggggcgccgtgcccaggatcgcctacctcatctccggctccgcgggggacggagccgcgctgcgccggacgctcagggcgctctaccacccggtaaacacatacgtcgtgcacctcgacctcgaggcccccgccgccgagcgcgccgaactcgcctctgccatccacgcggaccccgtctacgctaggttccgcaacgtcaaggtcgtcacacgggccaacttggtcacctaccgtggcccgaccatggtggccaacacgctgcacgcggctgccatcctgctgcgcgagggcggtaattgggactggttcatcaacctctccgcctccgactatccgctcgtcacccaggacgatctattgcatgtgctttctgagttgcccaggcagcttaacttcattgagcataccagtgacatcggatggaaggagtaccagagggcgaagccagtgatcatcgaccctgggctatacagcctgcagaagtctgacgttttctggataacagagaaaaggagtgtcccaactgcattcaagctcttcaccggctcagcatggatgatgcttactcatcagttcattgaatattgtatatggggatgggacaatctcccaaggacagtcctgatgtattacgcaaattttctttcttcaccagagggttacttccacactgtcatctgcaatgtccccgagttccgcaacaccacagtcaaccatgatctacatttcatttcttgggacaacccaccaaagcaacaccctcattatctcacactcgctgacttcgatggtatggttaacagcaacgcaccctttgcaaggaagtttggaagagaggatcctgtgctggacaagattgaccaggaactgttggcccgccgacctgatggatttgtgcctggtggatggacagacctactgaacacaactgagaaagggaaacccttcacggttgagcgcgtgcaagatctccgcccaggtcctggtgtggacagattaaagaaactcgtcacaggattgctcacccaagaaggttttgatgacaagcattgcctgtgaaactcccagtaagatgattctggggcagtaggttacacgctcaaatttgaaggcatcgggccatttgctaggaatgcccctactagctgaggcagcagcacattagcgtcatgtacgcgaggatgcaacgataaggaaggtgctcttacagacaactgcttgagttgagttaccgtacagcaggagaccacggatgtagcagtcggagatgattatacagaactagtagctcattagtttatttagatgattataatcagccccccaaccatgaataatgttggaatttttgacatctctgcgcccgagggttgtgcaaggtagcccattctttgtttcgaagccatggcacctggtgcaccagctggtagcgtgagacttcgttgtattgactagtggatgtttctgggtaaactgatacatttgattgcacacatgtattgatttgtttcttttctaaaaaaaaaaaaaaaagaagatgccat

SEQ ID NO: 5031 - DNA, 1136 bp, Zea mays
ttgggtacctcgaggccggccgggtttcgggtcggggccggcccggatactagcgtgagtagttttcattttcacccctgcctctgtatccgagcatactagcggatcctggcccgatccctcttcccaccccacccacctccgcttctctccaagtgaggaaccccaagccctcgccatggcgtcgcggatcctggcccgatccaaggcccttcccctcgtcgccgccctcacccctgccgctgccaaagcagcaacgcctatcgccggagcccgcgcgctctcgtccctgccccgctacccgtctgccccgtcgccccatgggctcggcaaggttctgggatatgaaccaacatctcacctcagtggaccacaagttttacctcgttggttttcctctctagcatccaatggatctcaggtgcagaagtcacagatctctgagacatacaagtcaggtggtgaaatgaaacagtctgagacacggaaatcaagtgaggaagccacaccaaaagttgtggcgttcagtccgctagaagcagctatcgctaaacctagaagtagtcccctgacaagtgagagttctaaagtaaggcgatcagagatagcaacccaagtcaccttttacatgatcccagccctgcttcttgcctccaagaacagcataagtacctcccttctggtcggcgccgtgttccatcaagtatacatgttccacaaggagattcttctggactacgtgcaccatgatatcaccagaaagtgggctttgatttacttcaagctgcttttgctggtgatggcgaaggacaccatcatgtacttcaatctgttctaagctcaccttctcagtttctcaaatatccagcaatgcatccgtctctgcactcgtagaataatgatgatggatgaattatgcagccttcgttcttgtattctccctaatgagcttgcttttttccagctgccagtttcactcttattaagtatatcagtctggatgggattgatagtgaccagtcagatgatatccctgattctgcacctcattaataatatgattaatgtcaattgtgcaactaaaaaaaaaaaaaatataaaaaaaaaaatataaaaaaaaaaaaaaaaaaaaaaaa

SEQ ID NO: 5032 - DNA, 2741 bp, Zea mays
aatgctctcaagagattatgttgtgtatgaagagtcgtgtagagacgcactattcacgaatagccgtttcttgtgttttttacatttaacccctagagacccctcaaaagacgggtattaaatgaggttacatataccattaagaaacagagaataaaaatacattctttgtaattcgatctagagatagttatgcctcatatactagtacggagggagtagtcaagtacactctgtagcgtggtgactttgtgtaagttaggatcaaaatctaagcaaccagttgctgtaggaattgtttttttggtggtattattatcgctatctatacgatctagagaaccatgttcaatctaatggaataaggtttcgtattgacctaggcaattttccctgggattagtcattttgttgaaagactctgtactatactctgtagcgtggtgatttttgctagatggcatgcttccatttaggaagaagagatacttttcatctgccctcatgtttacaattaccatgctgtagttgttctatataataaaagaagtgtttactctatcagcgatttggtttaaacagcttgtttcgatccgagatagggagcatgatagatttaaagcgctactgaaatcatgttctgggatttgactgtctggatattggctataatccaatcagtgaagttgtaaaaatgagcttttaagtatatttctatggcatagaacacagaatgcagatgtgactaggaaaagaagctcttcgctgttgaaaagccatctttaatcgacacgacaaaggtagcttatgccatgattcctgcaagtggcacttgcagcttggaccatggctaaccgtcaatggttcttgtttggaaatgttaacattcatttccatcttaagatcgttaaactcactttcggacaatattgttcctccaatttcaatagaaaattttagttgggccaacagttcagctgacttctctgtgagttggatagcatttgtccaattttctgtcacctttttgctaacttaaacgtggaaacacttgttgcaggggaccgatatttgaaaccattcgtcattccaaaaccagaagtcaccgttgttcctagggcgaaagatgacgactgcctcattcttgcaagtgatgggctgtgggatgtagtgtcgaatgaagaggcatgcaaagctgcgcgtcggcagatccagctgtggcacaagaacaacggtgtcacatcatcattgtgtgacgagggtgatgaatccaatgatcctgctgcacaagctgctgctgattatcttatgaggctcgcactgaagaagggtaccgaggacaatatcactgtcattgtggttgacttgaaacctcgaaagaaggccaagagcaactcataacactgggatggatccatcacggtagagctgaccatgatatgtccaaaggcttctgctgctagttgttggtcgtccgcaagagacttgaccccacaggtttttttcgttgggcctcaagaactgtaggtgcattttccatggagggttatgatgcttaaccccactctggtttctggtggctaaaacattctctccagtcggcttctaccatgagccctggcacttagtatatccctaatgttgtatgatggttgaacttgtaaagagacaagcggctgagacggtcactaaaattaacatattgttacttcatgattcaaggactatccatctgcctgaatccgatgaaagttttgtattgcagcttcaagtgtgtgcccacctatatatacagtttgattgggtacatatacatgattagttgggtgtacctccctaacatggctctttgtatgcgttgactagctccgagagcatgttgggttaactgcacgcactcgattagacatgcatgatgcaactcacgtatttgcggtagctttttgcctacatacgccgatacaggtaaaaatcacatatctgctgtcagggccaggctcatgcgagcacacctacacagacacagtcatccatcacacggatacggtctgattggatacctgcaggctcccgtgagggtggccgaatggatacgtcagttttgagagttcctgtggatgcaggtaagctaggtaatcaaacagtagcacgtgtaaagtcaacgcatacccatcagacggatagtaactccacacagactggcctgcaatctcatacaacaaatctaaggattcgtgtcctctccactacaataaaaacgcaaagctttggttctcgcggatgaaaggcagcaggtcattaactgacgtctcctcaatgtttggcattgacttcgaaatatcttcaagcgaaaagggtatgctgcgacaagaagagaaatgatattatgaaacgagtgtaactgagcaaataccatttggggggcatgaaaactagagcctacaaattgtcagggaatagacctggaatcatcatccagcaggaccgaaaagctggagacgctatttgattcttcgcgcagcatagctctcatgcttgacatgaactatgagtagtaaaggtaaattaaatgaaggtagctagcatttcgaacaaaacagtgcaagactaaagggataaagcctatcgtcttacctcggctgaagttacatttgttccctttaaatcatcccaatacataccgactatccgctctagctgctgcaaactgagagcctaaacaaatagctacatgagtacac

SEQ ID NO: 5033 - DNA, 3012 bp, Zea mays
atagccgcacggtgcgctgtcgcgtgccgaatcgcttgtgccgtcgtgcggtttcgtctcatctccctttttcgccgcacgccttggcccttttccagtagaagaagcgtcgaaggggacgcgcacatgcgccggcgtggcagagactgacccggccccaaggccgatcaggggaagggcggccgcccctgcctcccggggccagggggctgagctccccgcctcgtctcggcctggcctggttcgccctcgctccgacgcgtggtggacgcaaccagtgcgcgacgcccccggctcctggtccgttccgcagttccgcaccccgcttcgaccaaccaatcgccgccgcgtcgcgtcgcgtcgcctccttttttttccccgccctcccggacggcggcctcgttcgccagaagaaacccaggctgcagccgaaatcctcaagtctccgtcgtctgaccccacctcgacggcccagatccactcgccctcgccgccctcgtgcccctcagtccctcactccctcgcctcctcagcggcgaagacagctgcgaacggggccatttttaggcgggagcgcgggcggcggtgctagcagattggttggtttgagtggttgggccggctcttcgaaacgccccgccgcggcgatgggatgcttccattccacggccaagcggcagcatcctggctacgaggaccccgtggacctcgcctcccagacctccttcagtgttagtgaggttgaggctctattcgagctgttcaagagcataagtggttcagtgattgacgatggcctgatcaacaaggaagaattccagttagcattatttaagaatcagaggaaagaaaatcttttcgctaatcggatatttgaccttttcgatgtcaagaaaaggggtgccattgattttggtgactttgtccgagctctaaatgtgtttcatccaaatatcccaatggatgaaaaaattgatttctcgttcaagctatatgatatggatagcacagggtttattgaacggaaggaggttaagcagatgttaattgctcttctaggagaatcagaaatgaggctatctgatgatatcattgagacaatcctggataagacattctctgatgctgatgcaaatcaggatgggaaaatagatagaacagagtgggagaattttgtcacaagaaatccttccttgatgaagataatgactctgccatacctcaaggacatcacaacaacattccccagctttgtgtttaactctgaagtcgatgatctcgtcacgtgaccacgattttctctccgatgtatagttaacaaggagaacctgtcgagggttacgactggagatttctagcctctggcattatgaatggagggtatattcatgcggctaccaggaagggtgcgtcaaaattgtctgccacagatgtacttgacgagctgtagtttttactcggtgataatgttgatgcttttgtgttggtgatgattgggacttgagttagtatgcagagatgaacatttttcatttttaccagtgggaagtctctattttgtttgtgaaactgcgacgtgcgtgtctgtactgatcaaatatgattcttgtcaaagtagtactgcattctactattttagcgtaaaaaaaaaaaaaaagaaccaaaacttgcatcacatgtcattgaagtctctgagttattagtgtccacttatatatcttatactgtatcaacttaacactacatcctaaatataaggattttaaattgtcgagttgaaatgttccaaatgtgaccagctttataaaaaaaacaataataatgacggcatcaaattagcttcattagatttgtgagacaattttataatttgccactttgatgtgatagatattagctttataaaaaacaataataatgacggcatcaaattagcatcattagatttgtgagacaattttataatctgccactttgatgtgatagatattgatagatattgggtgtttggtttccagggactaatttttagtccctctattttattccgttttagtccctaaaccactaaagtttttgtatttggtaatttaaggactaaaacggaataaatggagggactaaaaattagtctctataaaccaaatacccccttagttaaaaatagaataatttaatttaacttcgtgtcgaggatacgatccacggtccctagggtccatccgtcagcgagcacactggggaaaggctctgggtccatcggttagctagaggattaacgtctaccctggaagaacccgccgccggacgaaccccacgacatcgagcccggggtcgggcgtggtgcaacctgactggagggttggacatgccgaagggaaatcaatcgagtggatcccacgactggccaaagaccaacctgtcagaaatgaccgggcgtattaactgcgcctcgcgccgagccatagcgaaggtgtcggtctgcctcccactcatgtgacctatgaacccctcgggccgtagtgcactcatgaccaacaagcccctcggactgcgtcgcatttatggcgcacacatccccggccaacacacttatgacctatcggacatagacttgagtgcgtagggcgcaatacgacgaaccgcgtcgagccccaggctacgaaggccaggggtcaacatagcccgaatgatggcgcttgggctccatggcgcccgcgccgcctgccataaagaatatgagacagccaggcgaccacgagaacgtgtgactttactcccatggtagaacgatcggtttaccgctacctggtgactccttcctaaggaagccaccactagctgaacccttctttagcctataaaagaggttggcccctagacgaggggatcccgaaacggacagacggaaacacccagaaggatgaaccccagacgaggaggaggacaaggaggctgaagccccgctgccaagccaaaacttagctaggactccaccttataaccacctcc

SEQ ID NO: 5034 - DNA, 1904 bp, Zea mays
cggacgcgtgggaaaaaaaaaaaaaaaaaaaaaaggaaaaaacttcaacctattgtcttctctgtttggccaacagtcaatagattcatttcagatatacaaagtgcttcaaggattgtgctgcaccgcactgtactgaagaccacaaaaaaaatgggctgcaaaattgtgtacaattactatccactcattctacaaaaccatctgagattttttacaaagctactctaccaaaatccgttggtttccttcccatctaaatgacctagcctttgcacccattgtgaccctcaattttgtacaaacagggtatctcatgccttaattttcattactttactactgtctatgataactagtagatagcaaatctggaagcaagtaatggacagctgaacattgaatctttgccacgggtcattactgaagtaggccatcaccttcccaaccaagccgcagcatctgatccaccaccttcaagctcaaagcgggatcagtaaagactataagctgtttatcagcagtagaaactaaaagatttgtgttctctttgtttagagcaattgctgtgatgtcctggccctttgccagcttcagagtatgaaaaaccttcagtgtatgcaggtcaacaaagcagattgaaggcgcgtgaacagattgttcagaattttttgatacatcatcagtgccattgggtccaagctcatgatccccagtttcagtactgttatcacacttgtagttgttgaacaaagatgttccaaataaagcaaaatggccatctgtagaaatctcgatgcaactaacttgtccagagaaaggcaacagaactgagttagcaatagggagtccattgacagtgaaggtagataatgttttctttgttccattccaaaccaaaatgattccttgagaagataagcatattgcatgtgcctcatcgacatcaagcctccttatcagcctgcctgtgcgtaaggaatgcagaagaatgcctgttgcatttgatgaggaagcaacaagtcctaagtctggactaaccgagcagcaggttacttccccaagatgtcctctcattacatgcattggaccttcaacgcgacgtctctttgtttctgagaggctgctcatggtgctagtgctgccagagagaggactgcgtggtgtcgttggtgtagtcggtggaggttcttgagcatttttcttatgtgaggagcctgtctgatgaatcctccagagtataactgtggtatctctagaccctgtcacaaggtagttgctatcaggtgacagcgcaaggcatgtcactggagcaatatgcccagaagcagtttcaattgtcttcgctccatctagggatatcaacttcaatgaaccatcaacgtggccaccagtaattatctctttgtcacatgtcacagcaacaactgctgaactgcggattgcagaagcagcaaatgctatagcccttgggaacccataatcttccgcagaaccagcagatcctttgaaaatgcgcatgagtgcgccactggttgaatttgtggaatttctaccatgatggaaaaggaaaggtgttccctgaccatctggagtattagcctgccattggtgaagtgccacatgtgctgctggggcatttacatcaacaactacaatagagtcgtttgatacaagcatagcactggcaggaacattgcaacgatctgaatgtggaagcacatatgatttaagttcacttggatttcggaatattgtctgtagttgtaagacctccgccagtggcttcctcttcatgtgaggtacagtcagcagttgagatggtgtttgtccaaagtaagctatttgatcttgtgtagctcgccgatccactgggtttgtaattttgtcaatgtcaacagtcc

SEQ ID NO: 5035 - DNA, 1400 bp, Zea mays
atccgttcccgtgggtttttagtcgcggcctcacgggatttgggtggaaaccgcggggggtcctttataagcgcggggcccccccggccgggggcgcgagcccccccgcgttcacgagccagaagagaagagaggctaaccaccgcagcagctgcgacctgcgagtgcgacaacctccgcggaggagttggagccggcggcggggatatttgcttgcccggctggggttgcggcggaaggagggagagacaaccggcgatggcggcgtccgcgaggcccggggagagggcgacaagcttcgccgtcgcgtgcagcctcctcagccgctttgtccgccagaacggcgtcgcggctgccgagctaggcctcaggatcaaaggcgaggtcgagcagcagaggacgccggcgacaactagcttgctccccggagcggagggcgaggaggtcgaaaggaggaaggagaccatggagctgttcccgcagagcgtcgggttcagcatcaaggatgctgctgccccccctagggaggagcaaggagataaagagaagcctaagcagctcacaatcttctatggcgggaaggtgctggtatttgacgatttccccgccgacaaggcaaaggatctgatgcagctggccagcaagggcagcccagtggtacagaacgttgctttgcctcaaccctctgcagcagctgctgtcactactgacaaggccgtgctggacccggtcatcagcttggccgctgctaagaagcctgctcgcacaaatgcttctgatatgcctattatgaggaaggcttctcttcaccgcttccttgagaagagaaaagatcgcctcaatgcaaagacaccatatcaaactgctccttcagatgccgcaccagtcaagaaggagcctgagagccagccatggctcggattaggaccgaatgccgtggattccagcctgaacctcagctagtacacaacaacacagccataataagacggcacagcaacggcacccaccatgacctggaatttgctttgccactagatcgagttcagaaaccataaatattcttagttatcgtgttttagtgttcgcttatgtcatggttctacgccctcttgtcgcatagttctggatgtaaagaaaagtagccagtcatgaccatcaccgggagtcggggagaagtttttggagggtgttaacacacggcgactctgaattggccatgctaaggaaaaggatagtgcaatgtgaggtatatgtattttctgaaagccagatcgtttgggtctagccctgatgtatgcagaacaagtgattattgtaatggatcctgattatcctcatcatcctattgttgttttctgatcacgacaaaaaaaaaaaactaaagcttgtacctgccc

SEQ ID NO: 5036 - DNA, 2524 bp, Zea mays
gccgggtgattttgagaatccatggctgaaggtaccttaaagcaaaatccgctatccaatggtcatggtggaacggacacaatagcaggattattagcatcactgatggaagttgtgcggacaacagtagcatgcgagtgtgtatatgttcgagcaatggtcatcaaagctttgatatggatgcaaaatccccggccggcttttgaagtgctaaaatctatcattgcatgcgagttgtctgacccagcctggccttcctcgctcctgaatgatgtcctactaaccttacatgctaggttcaaggcaacccctgatatggctgtgactctgcttgagattgcaagaatttttgccactaaagttcctggaaagattgatgctgatgttctacagttgttatggaagacatgccttgtaggagcaggaccagatgggaaacatacagccttggaagctgtaactatagttcttgatctgccaccacctcagcctggttcaatgtctggactcacttctgttgatatggtatctgcctctgatccaaaatctgcaatggcactccaaagattagttcaagctgctgtttggtttctaggagaaaatgctaattatgctgcatctgagtatgcctgggagtctgcaacaccacccggtactgcattaatgatgctagatgctgataaaatggttgctgctgcaagttcccgtaatcctacacttgctagcgctctgacaaggcttcaaaggtgtgcatttagtggaagctgggagatccgcattgctgctgtacaagccctaactaccattgcaataaggtctggtgaaccttatagactgcagatatatgaatttcttcatgctttggctcttggaggtgtgcagtcaaacttttcagaattgcagctaagtaatggggaaaatcaaggtgccagtggtactggtcttggatctttaataagcccaatgcttaaggtcctagatgaaatgtatagaggccaagatgatcttgccagagatattcgccagcatgataacagcaaacaggaatggagtgatgaggaactcaagaaactttatgaaacccatgagaggcttcttgattttgtttccttattctgttttgttccaagggctaaatacttgccccttggtcctaccagtgccaagctaattgagatctaccgcaaccgtcataacataagtgcttctggtggtctaagtgatcctgctgttgccactggaatatctgatcttatgtatgagtccaaagaagtacataaagagaccaatactgtccagtctggtattgatcccgatctggcaatggcctgggcagcaggtttggaagacgatgtttgggcaaacaacgctccagctgtggataaagtaaaggacttccttgccggtgctggaactgatgctcctgatgtggatgatgaggaatacatgaactcgaggccatcagtcggatatgatgatatgtgggctaagacaattcttgaaacttacgatgcagaggaagatgatggtaggtactctggtggatcctctcctgaatcaactggttctgttgaaacctccatatcgtcccattttggaggcatgaactatccatcactgttcagttcaaaaccgtcaagtcatggggcctcacaacaaacgatacgtgaagaaccaccctcatattcgacgtcagtactacagaggaaggaatcatttgaaaacccccttggagggggtggaggacgaagtttcggatcccacgaggatgaagataagagttctggtaaccctcagtctgggaaagctttgtatgacttcacagcaggcggtgatgatgagctgagtttaaactctggagaagaagtggagattgaatacgaggtcgatggttggtattatgtgaagaaaaggaggcctggaagggatggaaagatggcaggtctggttcctgttctgtatgtgagttcatgataacagccgtgtgtatcgtttcccacacttgtggaagctgtttggagttcatgggcttaacaaaaaggcacactggaatgctcccgagagatcttcgcataaactcgtgcccgtcgtataggcacgtggccttgtggaagcaggtcatatccagtcatcttggggttcgtatgatgctgcagtgctgttcctgggaaagatttacgtgttgatttgtctggacccacaccacgagtcattcaattgattgttttttgttgctaaggtggagactcttcagaggttaaaccgttcatctgtgccattttgctgccgtctgtgttcaagaaggcaatttcgtcgtctccagttcgtgttgtgcgatatatattctagtaaaattgtagaggcatcatttccccggcatatattattttggtcgtgtatggtgtgattctggtggtaaaatagtgtcattaatcttgtgtatatttgtttccgggtggattacagagtatataactataagggggtgtttggtttaagaaatcaagcaaaaaaaaaaaaaaaa

SEQ ID NO: 5037 - DNA, 2807 bp, Zea mays
ctcgaggcgtccatacgcctcagccccagctttccactcgctcactagtccccccccccctccaccgaccccgaccccgatccccgccggtgcttcgccaccccgatccccaccgcgcgatggcggagccggctccggctcccccggtgaccgcgccgctggtggggctgctgtacgacgagcggatgtgcgcgcacgcgacgcccgacgggaaggaacacccggagaaccccgagcggctgcgctccatctggcgcaagctcaacgccgcgggcgtcgcgtccaggtgtgtggcccttaaggcaaaggaagctgaggacaagtatatagcttctgttcacagcaagagacatataaagctgatgaaggaaattagctcaacaatatatgatgccagcaggaacaagattgctaggaaattcaattccatttacttcaataagggttcctcggaatctgctgttcttgcagctggttctgtcatagaggtagctgagaaagttgctgcaggtgagttaagttctgctattgctctagtcagacctccaggccaccatgcagaacatgatgaggctatgggattttgcctcttcaacaatgtggcggttgcagctaattatctcttaaacgagaggcctgatttaggtatcaagaagatattgattgtcgattgggatgttcaccatggaaatggcacacagaaaatgttttacgatgatcctcgtgtattgttcttctcagttcacagatttgattatggaagcttctatcctgctgaaggggatgcttctcattgtttcatcggggaagaagctggtaaagggtataacatcaatgttccctgggagcatggcaagtgtggtgatgctgattatattgctgcatgggaccatgtactgcttcctgtcactaaagtttttgatcctgatataattctggtatcagcggggtttgatgcagcattgggtgatcctctcggtgggtgctgcattacaccaaatggatatgcactgctactaacaaagttgttaggatttgctcaaggaaggatagtgatggcccttgaaggaggttataaccttaggtccatagcgaactcagtttgtgcttgtgcaaaagttctcttgggagacaaattcacattcaacactccagagatgcaaccatttgaatctacatggagagtaatacaagcggtacgcaatgaattgaagacatgctggcctgttctgagtagcaagttgccagaaaatgtatcattgaggattaagcctgcaccaagcgagctctacgcttcttctgattccgaatctgatagtgaagatgttgatgagctccttggcactgttgcatctgtcaatgttattgaagctactggtgttgctataagtgaacacctctcaaagatgaaacttgatgatgacagccttgcagtgaagactaactcaagttgctcagcagcagaacagcatccagttgattcagtaaaagtacataacaatgcatctgttgtgctgaccaaaaaaatatctgatttatctcttgagtggcgatcagatttatcgaaaactgatgtctggtatgccagttttggatcaaacatgtggagaccaagatttctatgctatattcaaggagggaaggctgagggtatgaatataccatgctgcggatcacgtgacacaagctcaccaaagggaaccgtgtggaagactgtacctcacaggttgcttttcggtagatcgtctaccccttgttggggaactggtggtgtggcttttctcaaccctgagataaactacaatgagaagttgtatgtctgcatgtacaaaataacgttggagcagttcaatgacatcttgtttcaggagaatcgtttagtgctggaggatggcaaagacggaaacactgtgtatcctgactctcctttgattggttcatctgaaatcaagtttatatctacaaacagagctgttcatcttgaacctattaaggatagctggtactccaatgtactttatcttgggaatgaggatgaagttccaattctaactatgacgtgccccgcatcagatattgagaggtataaatctggtgagctgcgtttagcacctccatcagagacgtatgcggccactctgataaagggactagtggaaggcaagcaaatggatgcggacggagctgccagctacatcaacgctgctgctgcaagagccttgtgaaggctgcttcagcgtgtgcttttgtacagccagtaaggagtagtaaggatacactatctgttagcgtggcgacaccaggaaaccttcattgtccgcaaatggagaacttggatccaatttgaattgggcagcatgattcgagctcgccctagcttgattactggtgaacggtgatctcccctggctggttgattctgggagaaacactagctgtgtcggggtggagcaacactagttggcggttgcaacaggtgctctcactgcactggtatcgtgcttgtctgacataccgtagtatttgcatggcatgctggtgatgttatttgtgcaattactgcattatgttctgttaaaaaaaaaaaaagaaaaaaaaaaaaaaaagaaaaaaaaaaaaaaaaaagctcgagggggggcccggtacccaatccgccttataaggaggcgaattacaattcactgccgccgtttaacaacgtcggatggggaaaacctggggtacccaactaatcgccttgaaaaaatccccttttcccagttgggtaaaagcgaaaagccccgaccgacgcccttcccaaagtggca

SEQ ID NO: 5038 - DNA, 3793 bp, Zea mays
ctaagctggttcagtatccaactgatggcaacctcgcaggtgtgacgcttcatggcagcggcgtcccgatcttatttttgtatgcagtggagtgtcctatcgccagcacggcaccactcaccagtggatgatcgtcacgatgcgtggagaaggagaaacgatagcgaaatgcggaatgactgaaccatcgagatggggggaacgggccgggcccggccgggcccggcgctcacaccgctgtagccccgtcccactcccacgtcccacaccacaccgatagtaacgagacgtggggcagccggtgcgagccaggaggaataatggcgggcgccatgcggctgtctggccgctgctacccggaagcttcggcgaaggcgccatggtccctctcacacctcaccagcttcccggccggcccggaacggacgacgccgcgctccgctccctgctcggcgccggcgccgggccgttctcgctcgctctcgtctcgtctcgtcagccgtcagcagggggttcagttaccatgtgtcccccggctacttttgtcctgtcaggttgccccattccttcgtttcgagagtcgagctctgcccgtcgcggttgcattgcagcactgaccaccaaccagatcggaactcgaaggcacggctcttctcgtgcctgtgtctgtgttcagtctcacttggcgtttcactgaaaaatctccgtcgaaaaaaataaacaaaaaacgtcaatgcggtagtttccaggtgcagcaacaacagtgcaacacctacgcacagagtcacagtcacagactcacaggtcggcagggggagatctttccggaggcgccagtgccggtggcagtttcaactttcaacgcgagaatagatagatgcaggtcgggcggcgatcacatcctggagtgtggtgtggtggcctgacacgacctgatccgaccccaataattctcgccgtctcactcaccagtggatttcctcgccatcccgcgcgggccccgacgtcgtaccagaccgatgccatgatcccacgattcccaccccctcccccggccggcaccccacgtcgtggcgaggcagttggccgctccgccgcgcccccgcccccgcccttgtcaggacacgagtggcagctattaaagcgcggggtggggatccttgcaaccagagccactgccaccactgctgcccacggccacccacaccacaccacaccaatacaccataccagaaggagcaaaaataagacgagatggcggacgagcgcttgcctcaaacggccggcgcccgcacggctctcgccagagctactggatcctcggcacggaaacgcgcccgcgatagttaggtgcgcctgtgggcccggccggctcgtcacttacataggcgcacgcacccccgcctggtgcgtcgtcgatcgctgctttgctggcgcgcggcggccctgtgtggcacagtagaggtctgctgaggacgacgaccggaggcgtgctgcgtggatggtcctcatggccgggatgctccccggcgtggagtgcgcgcggcggcggcgggtccggcagggcggggcggggatgggagcggaggcggccggaggaggcacggggcggcggtcctccttctgcctgtacgcggccggccacggcggcgccggcaattctggcaaggtaggagaagcacagcacagagattcacagccgtctggtcctgttgtcgcgatgtataagcagcgtacgtaaaggcggttgtgttgttgttcacggcagcggagcggcggcgtggtgcacgggcacgggtggacgctggacagcaatgcccgggaggccaaggagcggctggaccagaagctcaggaccaagagggaggccgccatcaagaggtagacgcagacctgccacccgacacacacatccatattattcatccatcctccacgggctttgcttgtgttccgtgccagtctgaacaacactagctagctaggtcgttgttcctaaagatctgaccttgcagcaggcaccacagcacggggagcataaagctgggcgtgccgcaccggagcgccggcgcggacgagcgcggcgagagctccgcgccggcgatggccggcgtgcagcgcgaggtgtactcgaagaagggcgtgatgcggcggctgatgcggtggagccggccgcggtgggccgcggcggagcaggcggagtgcgcggtgtgcctggacgagttccgcgcgggcgacgtgctggcgcacctgcgctgcggccaccgcttccactgggcctgcgcgctgccctggctcgagggcacctcgcggtgccccttctgccgcgccgccgtggacgccggcgccgccgccgccgccgacggcgcctagaagcggccgaggctctggtcttgctggggcttgccctgggctgggacggcgcggggcgccttgtcgctgtcggcccacgccagctacgctacccccatggcgttgccacgctaggcagtggctagtgggggtggtcatggtgagtggtgaccggcctgcttgtgcatgtggcgcggagcggaggaggacagcgagacgcgcacgacgaacccgtgagtgccttggcagtttttgcacgctttgcgcgcgcaaaggcacggttggtgcacatttgttggttggaccgtttggcccccctttgccgtgtcctcctcccatcatcgcgagcaagtgatgaacggttttgttttcgtgtttggggagcgctttgtttatggactctggtattagcggatagcggttccatcatgtaattcatgtcaaaaaaaaaagatcgtctgatcgatcttggagaaagaactgtaatttagatcaacatcaatcacatctgtgtacagtctcagtgttgttgctctgaacttgtataattttctgtttgctcagggggggcctcttgcggttggaggtgaggtctctttagaacgtgatgctaatgtaggatcttgttcccccatgaccacgcaggatattttttttgttctgttaaaattcccgcagtgttctcgcggaacatatgcttccccgaaggatgctacatgatcatgatgcccatacatgtggtcgtcgtggatccgcattaccatatactcggggtgtacggacccaacggtttctccagccctcccacaggccacagactgctgccctagtaggcggcgtccccgggctccggcgactctgctgcagtagctagctgcagcctcctgcaggaggaccagaagcgcagaagccagccccaactcccagagtcccagttccgctttccggtgagatcgcggctggtccttctccagttctcctccctgtcctgccactgccaccgcaccgcacgactctgaacgctggcaatgcaataggcaacggcaaagccggagacacgcttggttttggctctgtccgtgtccgtgcaatcatccatttgctgccttggccccctccggcctccctgctgggccctgggcgcgcgtacgtcatcacgtgtcctgcctgcgcccccggagcgagcggcagttcttgtcgccacgcctctaatggcgcgcatgcatcgcgtcagtttcgatggcgatggcaccagcaccatggcgccgccctctttaccagttaccacccgcctccacacacacacacacacacacctctaatggcggtgagaacggctgttagtggtgcgcgcgcaagtggtgaggatctctctggtctctatgcttatcatctggagaagacctataccctcgtgttccgaaacctgcaggcatgcaag

SEQ ID NO: 5039 - DNA, 1367 bp, Zea mays
cctcgaggccggcctggccgggataaattataactctacacgcctgttgtactgcggccgggatgagatcggggtcggtgcccatggtctagtcccgaaatttgcagccggcatccacgagagctacgaccagcggccagccccccctttcggcctttccctcccatatactcgccgtcggccagcggatctaatcggggcgggcgcgatggctgggcagaaccagcggctcaacgtcgtgccgacggtgacgatgctcggcgtcatgaaggcccggctcgtcggcgcgacccgcggccacgcgctgctgaagaagaagtccgacgcgctgacggtccagttccgcgccatcctcaagaagatcgtcgccgccaaggagtcgatgggcgagacgatgcgcgcctcctccttctccctcgccgaggccaagtacgtcgctggcgacggcgtccgccacgtcatcctccagtccgtccgcgcggcatccgtccgcgtccgctcccaccaggagaacgtggccggggtcaagctccccaagttcacccacttcgtcgaccccgccgcggcctccgggggcccctccaacgcgtccccgagcctcacgggcctggcccgcggcgggcagcaggtcgccgcctgccgctccgcgcacgtcaaggccatcgaggtgctcgtcgagctcgcctctctgcagacctccttcctcacgctcgacgaggccatcaagaccaccaaccgccgcgtcaacgcgctcgagaacgtcgtcaagcccaggatcgagaacaccatcagctacatcaagggggagctcgacgagctcgagcgcgaggacttcttcaggctcaagaagatccagggctacaagaagagggagatcgagcgccagatggccgccgccaggctatttgcggaggaacagcttgccgaggatctcgcgcttaagaggggtatctccgtgggggctgcggcaaacctgctggttgctggtggggagaaggacgacgacatcatcttctgaccactccttccatggccatccagtcattcaatcgtggcagaaacaataagttgatgctggagctccagaattgtatctgtttatagaatgatggagattttgattcagtaatctggagtctagccatccgagaccctcaataatctgtacctggaaaccaaacagtgccaagtaacttttacggagcgttatgtgcagctcgtgtagaaaattcaattgaaccgtatttcctgtcgtgtaccttccagtaccgtattatattatatatttattattcaattggacctgcactcagaagttgcagtctgggacgtatttgcttttgcattttataaccaaaaaaaaaaaa

SEQ ID NO: 5040 - DNA, 3040 bp, Zea mays
cccctgatgtggatctaatcgaaaaataacacatcctaacaacaagtttaatactcgagattatggtgggttctaatcctgatcatgtgatctgcagctaacaataaacatattcatatactaaagtcgactctaatgttggcttttagacgaatcatacgtctatttctctttcattcttttgtcttgaaatccatgtaccacctagctattgtataagagcgaactatctttactttgttatgtctctctctcccacattagcaaaattgccatagaagtatgcttagagctcactattgaacttgctatagtttatctcaccactagtacttggtcccacacgtaatacgctcagtttcttagaatatgtgaaaacttatatctatttgctcgtcgctagctattcttgttttccccatattttctacccacgtagtaaagagagtgaatctagctagtgaatagctagccattggagacgccctaagactatctctaacaaactagccaaatggctcgtcaacccaaattttagctactcaacagcaaaataactctccaacataccagctatctgactcgccaagctattcgagccaaacttggctagccacctgactagtcaaactagatagaaagtctgttaaagggagaatgtgagatgctacgtatagagtgtaatctttatgaaaagataaatcgagagaaaaaataaagagtctcttgaagatgtttacttaatttacgctctgattgcctatcgaaacaaaaagtcgatgccttcgattttgtctttgggcgctatcattatagacatggaccccccacctttagcatgtggtcctctatcaatcagtctagcaatatcccggaaacattaacacgttcatttatggactttgacattctcaaggaagttctgatgcacccaagtttattaatgtgttttgcttcagttgctgcataaccataggtcgtgctctttatgcagatttcactccgtctcgtggcagcacacccgtctaccagcccagagcgcagacggtgatgagcagcatctttcagccagacacgcgcagttccaaatcaccggagccttctccgaccggacggaggaagctcgctgagctgctgcaggaggcaatgcaagacggtcccgaagaaagcgccgacgaggaggagcagcagcagcagtcgctatctgctgccgctgatgggaagccgccggtgtctgagtccacgtccagctccgcttgcagcaccgtgccgactccggtcgcagtcgccaagagccggaaggagaaggcgtggtacaccggacgctgttgcctgccgagctttgttcatagcctgaccttagacgagagtgagagggggcagaagatgagctctaggccatgtgctgtttgacggtggggctccagtgccctcctgagtcctgccctgagctgtatttagcgcgatatgttatctgaatgcccgattgggacgctgaagctactgtattgagagtactatatagtaatcaagtggataataggcactcgttaaatcctgtggagaccatgtgtatgtgtcgaccaatttgcgcgggtagagcatctacctcaaggaattgcccttccctgtgcatgtctaactgaatctttgaataaataaacacactgtataatttttcagatgcaaaaaaaaacaacagttcctacaatgttattggtatgagatgtcctcttggcgcttgcttgattcacgccagacaaatgtgttgtttcactgctctgttctataccaagtggacctttgttttgtttccttctaaaacaaatggtttttatttggcagctgtgtcatggatcatgcagggttcgtggtttttagcgctgatcgagcgtatgacaagggcaggctaactgctaagaatgtgatgtgatcaccgtttcagttccgtccgtcccaaatagcgcgtgcctgactggataaccacaaggatggccaggagcccaagaacttctacatcctttttgtttgtttctgaacatgcgtacctgactggaactgatgttaggcagaccaatgaatcttagcagtggccatgaacccattggatcaaacatggcattggcaaccgaaccaacgaacgaatgcccaaaaaaacgtacgtagtatatacttatagcacccatgggtatgaccgtatcacaacacaatggcccgccctgtgtttctggtttcccatgatgctcttttgtgtagtcatttatatcaagattgtgtttctgttttctaattgtgaaataaagcatctgttgatacaatgataaggcaatgtagcattacaaactacaaggttcctttaacggtacagtattcagggttataactccgtgttgctacacctgaaatcacgccaaccgcctgtctgacgaggaacatgtcgatagcatcatgaagatcacactgatccttttcatgctcagtacctgcacccttggtccccaacaagatcgacctcccagtgttcgtacaatggtacatgtagctccaaccgtcacgataaatgactaccgaagtgtggtagccatgaaggaccggatacgttgcaggagttctgccttcaccgaagcaggcactgatgctcttcctttcggaacaataacatgaatgaggtcatctaccctcacattatttcttcctttcttccttacatagtccctgcagaatgccttcatctcatccatccagccgcactcgacgagccgctcgcggaggagctccgtcagcttctccttctctccactctctacaaacttgatgttaatgatttctacgagagaaggctccttgtcccgatcctccaccgcgctcggcgtaggcggacgattaatcgattccctcatgcttcaattcggcttagatgcgccctcctttagcttcgtcgctccttcgattcctgagcggctgagcgtcgtcttcctcggtttggtggtggagtgcgtcctggcatctgatgggtcatcatgccggcctcgaggtaccc

SEQ ID NO: 5041 - DNA, 3457 bp, Zea mays
ctttgcggcccgcccggacgcccccgccgggagcagcaacagtcaatcacagtccccgcttcccggcggccaccgctgcatcctcccctttccacgctccactctcctagcgcgcccgccttcatgggccccgttcgactcgccctcctcctttccgtcgccgccgtcctcgccgccgcgggcgcggtgtacatcccctacaacacgtcggcgggggtggtgccggggaagctcaacgtgcacgtcgtgccgcacacccacgacgacgtcggatggctcaagaccgtagaccagtactacgtcggatccaacaactccatccagggggcatgcgtgcagaacgtgctggattcgctcatcccggcgcttctcaaggacgagaaccgaaagttcatctatgttgagcaggcattcttccaaagatggtggaggaaccagaatgacatgatcaaggatacagtgaaggggctcatcagctctggacggctggaattaataaatggtggcatgtgcatgcacgatgaggcggctgtacactatattgacatgatcgatcagactacacttggacacaagtacatcaaggaggagtttggccagatcccacggattggctggcagattgatccgtttgggcactctgcggttcaggcttaccttcttggcgcagaagtaggattcgatgctttctatttcttccggattgattaccaagaccgtgatacacggaaaggaacaaaagaactcgaggttgtatggaggggctccaagaccttgggctcatcggctgatatctttgctggcatctttccaaaaaactatgaaccacctcctggtgatttttattttgaagttgatgataattcccctgttgtccaggatgatccccttcttttcgattataatgttgaagaacgagttaatgattttgttgctgcagctgtagcacaggcaaatatcacgaggacaaatcatatcatgtttacaatgggaacagacttcaaataccaatacgcagagagttggttcagaaatatggacaacctaattcactatgtgaacaaggatggccgtatcaacgctctttattccacaccttcgatttataccgatgcaaaatatgctgcaaatgagcagtggcctctcaagaccaatgatttcttcccatatgcagacaacccaaatgcctattggacgggttactttacaagcagacctgccttaaaacgatatgtccgcacaatgagtgggtattacctggcagctagacagctggagttctttaaagggagatatagctcaggtctctcaacggatagtctaggtgatgctctagctcttgcacagcaccatgatgctgttacaggaacagagaaacaacatgttgcaaatgattatgcaaagagattgtcaattggatatacacaagcccaggagctcgtttcaacttctcttgcttgcttgacagagtctggctcaaaatcacgttgtgcatccccagtgacaaaattttcacaatgtcttctgctaaatgttacatattgccctccttctgagatggacttaacgaaaggaaaaagcttggttgttcttgtatacaactcgcttgggtggaaacgagaagacgtcattcgtataccggttttcagtgattcgattgtcgttcatgattctgaaggacgagaaattgaatcacaacttctgcctatagctacagcctcgttgaacataagagaaaagcatgtcaaggcttacctgggcacaacgccaggtgcaaagcccaagttttggcttgcttttcctgtgtctgttccacctcttggtttcaatacttatttcgtctcaaacttgaagaaatcagcacatatttcttcgaagtccactcagtactcacctcaaggaagtgaaagtagtaatctacaagttggtcaaggcaacttgaaacttcaatataatgaagctggaaaattatccctgtactccgatagtaagactatggttcaagcaaactttgagcagaaatacaagtattatattggacaggatggaaatggaagtgatcctcaggcttctggagcatacatattccgccctaatggcacagttccaatcagtactgatgggcaggtttctctcacagttctgcgtgggcccatattggatgaagtgcaccagcagataaattcatggatttatcagattaccagggtttacaaggagaaggactttttggaaactgaatttatagttgggcccataccagtagatgatggaaatggaaaagaagtagcaactgaaattgttacaaacatggttacaaacaaaacattctacactgattccagtggacgtgatttcatcaaaaggataagagattatcgatcggagtggaagattgaagtgcaccagcctattgctggaaactattatcctgttaatcttggcatctatgtggaggatggcagcaaagagctgtctgtactggtagacaggtcaattggaggttccagtataaaggatggacaaatagagctaatgctacacaggaggctactccatgatgatgggaaaggcgtcgccgaggcgctaaatgaaacagtctgtctcgataagcaatgtgaaggactcattatacaaggaaaatactatgtcaaaatagacccacaaggagaaggagctcggtggcgtcggacatttggccaggaaatatactcccctctccttcttgctttcacagagcaggatggaggcaactgggcgaattcacatgttgcaaaattctctgcgatggattcaacttacagcttgcctgataatgttgcaatgcttacccttcaggagcttgaagatggaagtgttctccttcggtttgctcatctatatgaggccggggaggacaaggatctttcgtctttagcgagtatcgacctcaagagagtgttcccggagaagaagattggcaaggtcatcgagacaagcttatcggcaaaccaagaacgcgcagccatggagaagaagcgtttgaaatggaaggcgcaaggttctgcggcggacgagaaggtggttcggggtggccctgtggatccttcgaagctcgtcgttgagctggggccaatggagatccgcacattcatcgtcagctttgatcacatcagtgacaagcaacagctctaatcgtctccgactagacgactaggtctggatgaagttgtcgtgcggcttcgaaataaaaaataataatgtggcctgctgtgtacctgtggttcaacccatgatatggcctgctgtgggtcagcacggttctaaagctaaggacattttataaggcaaattttgctttagggtgtcactcctctcctcacgttgcaaaaatacagaaaaaaccagcgaaaacatgattgcaaacaggtaagcgcccgccccccccccgcaattttataaaaaaaaaaaaaaaaaa

SEQ ID NO: 5042 - DNA, 3083 bp, Zea mays
  misc_feature (2872)..(2872): n is a, c, g, or t
gcacgagaccattacctagaacatcctaatctaaaagatagagaaatgagcttcgctgttcgagaaaacagcagagcccggccgaattcgttgggcagcctgcggagatgcagtagaggccgccaggcgcagatggaatgagcgaccgggctctgctccgccgctagcctgccgccgcaccgcgccgtcgatcgccgcgccatgaacggtccccgcggctaccccctttctccaccggcaccttacccccgtatggcgtgatccaatgatagcaccaagagcgcaccttcccctctccctgacggcgtcgtcctccccgcacggcggcgcgcgcacccgcaccaagaagaggaagaaaccatgtcccccaacctggacagcgccatcaagagccaggtgccggcgctgctcctgaggcgtctcttcggcgcgtcccggcgggacgaggccaagcagctccagcggaccccggcgccggtggggaggcggcgggtgttcgtgcagacggagaccggctgcgtgctcggcatggacctggaccgcggggacaacgcgcacaccgtcaagcgccggctgcagctcgcgctcaacatgcccaccggcgggacctcgctcaccttcggcgatcgcctcctggagaacgacctctccttcttacgcccggactcgccgctgctgctcacccggaacagcatcaaccggagctgctccaccccgtgcctctgccccgtctccaaggacttcgagcacaaggactgcagcggactggttgagatgctcggctgttccagcagctgtgcccgggtgaagcgcctcgtggacgacgtggtgactgccatcaggagcggcgtggatccggtccccattagcagcggccttggtggctcgtactacttcaggaacgtcttgggcgacagggttgctattgtgaagccgacggacgaggagccctttgcgccaaacaatcccaaggggttcgtcgggagggcgctcggtcagccgggcctcaagagatctgtgcgagtgggagagacggggtttagggaggttgcggcgttcctgttggaccatgacaacttcgccaacgttcctgccacggctctggtgaagataacacactccattttcaacataaactgcccggtaaatggaggaaacctggcaccggctcatgaccagcaacagcaagttaacagcaagattgcttcgttccagcagttcatagcccatgacttcgacgccagcgaccatggcacgtcaagcttccctgtcgctgctgttcataggatcggcatactagatatccggattttcaacactgacaggcacgccggcaatgtgctggtgaggaagcttaacggtggcacaggccgctttggttgccagacagagctgttcccaattgatcatggcatgtgcttgccggagaacttggaggacccttacttcgagtggatccattgggctcaggcttctattccgttctctgaggaagagctcgagtacatcagaaatcttgatccaaggaaagatgtgcagatgctgcgccgggaacttccgatgatacgtgaggcctgcctacatgtactggccctgtgcacaatcttccttaaggaggctgcagctttcggactctgcttggccgagataggcgagatgatgaccagggagttcagagggatggaggaggaaccaagccagctggaggttatgtgtatggaggccaggaagagagtagcagagtgggagcccttctctgccacagctgaacatggagaagataccgatttccagttctcggtggatatgctaggagaatacagtgatgtagtgcgatcaccaaggttcaatggctcaggttccaaggtgtccagtttcagaagccctttgtctaagctcgtcgagagcgtcgacgagggcagtgatggccatgaagatcaaaacgagtctgatcgagtcttgtatgctggatggaatacatccagcgttcctagcaaagctatgggccatagtggcaatgcctcaaaaagtgcaatgaacaggagtgccgatgaacaacttccatcaagtatgtgttttgtcaggctgtcggatatgagtgcagatgagtgggatgtattcctcgaaaaattccaggagctgctgaaagaggcactgcacgagagcgcaagggcagcagcaggtcaaaggatgaagcagcggctgggcacttcatgcaagttttgagcagggcaatagcgcatcagagaagaaaaaaatgcagtgctacttgtactgcttgcttatggagtgagtacaggatgaagatatcatcgtatgcggcaccttcaaccttgtgcaacgatctaggttgcagcagccatgtccagcaggtagataggaccacaagcatatgtagtgacggtgtggagaactgctacgcgtgtttattagctatatgtttacgaaggggaatgcttaataataaatgtttgtcagcctgtgtatattggcttgatgttagatactccagctttagcatgcaatttcttagtcgctgaaaattctttgtagcttgtgatgtgacctgtgagcagtgtaaacattgcacctttgatggaaaaataatgcttacctgttgttgaataaaaaaaaaaaaaacctgtttgcttggtctccaaaactcttccaaggcatacaggttaagtagatcacaggttggaactgttctggagcagttaaaataccagtaacatgagctcatctcgcctccagcgacagcttcacaaatgggaacaaagaaaaaatagctgcaggcctgctttgtcttccaatcagaaaggtaaccctacactgcatagtcagaaaggtgatttcaactacactgtgatgncagttacaagatgtcatcacaagaacaaatagtcattagtcgtgtcatcagtggaaagaagaatcatagagacggtggataactaaacagaacatagagagcatttagccaaggactaattctatcagcgcagattcgcttacaacatcatgcagtttcacaaatttgacagcataggttgttagataatattaagaatgtatctgtaaag

SEQ ID NO: 5043 - DNA, 910 bp, Zea mays
tttttttttttaaactgaaacgctacactttatgaaatggacatggacgtaatatataagtgtcaagtcgagctcgtgaatagagccatttcagtattgacagcaagatctcttcaattaagcattttttatccattacaatgcgccttgctcccagtatgacgaaatacagaaaacaaaaggaaagagaaaaattgaaaggtggaggaacccagtaactctgcatgtgaaaattttcttgataacaacgaaaattttcttgcctgagaattatttaccgagggtatggacctgagccccaccaaggcgcccaatatgctctacggaacctgacattcaaaaaccttcctttttcccgttttggacatgaacggaacaacccaaaattgctagtgaatcgagcttgcgtgtgacctatcaatgctctcttattctgatggtaaagaaacccaccctcgccgcagcttctctacagagaccacagcttattcacattggagaggcctatcagaactgtgtcaagtgatagaaaatttatgatgagaggatcactcccaccagctcaataaaatcagcgcccaccaccagggctcgaactgccggcacttgtaggagtctgagtttgcataatggtatcatgatggaataccccttttggcaagattgctccaacaggcgcgggtcctgccactggtgatactacatgattgatagatggatctttagttgaaatatattctggggaagacgaagatggagccaacgtggcaacggagaagctaataggatagggagcaattggcatgtcagatagtggcaaagcagatgaactgtagcctagtgtacccagggagcgaccacgcttgcatgcaactccatatctgcaatatccattttgggcatagtacgc

SEQ ID NO: 5044 - DNA, 1646 bp, Zea mays
ctcttttagagttcctagctagatatttattatctctacctttagctatttattatctcgcttttctttttttttttgtttattgcgaaatacggcatatattccgaacaaaagcatccattggcacaattaattattcatgaaaatggggaatcgaaacatagcaacagtgacacatggatcgtctggtccaatcgaagtgaggcgcgtctcactcgtcgtcggcgacgcggacgagctgctttccgacgttgcgaccgtggaagagtcctatgagcgccttgggcgcgctctcgagcccctcggcgacgtcctcgacgtaggcgagcgtgccgtccctgatgtacggcagcacccacgcctcgtactgcgggtagaggtgcttgtggtcgggctcgatgaacccctgcaggcggaggcgcttggagatgacggcggcgaggttgcgcacggcgtccttctccccgtccgccaggttgtactgcgagatgagcccgcagacggcgatccgtccgtgcacgcgcatgttgagcaggacggcgtcgagcatggcgccgccgacgttctcgaagtagatgtcgatgccgtcggggaagcagcgcttgagcgcggcgccgaggtcgggctcctccttgtagttgaaggcgtcgtggaagccgaacctggtcttgagcagctccaccttctcccgggacccggcgctgccgacgacgtggcagccggcgagcctggcgaactggcccaccagctggccgacggcgccggacgcggcggacacgaacacggtctcgcccttcttcggcgcgcagatctcgtggaagcccacgtacgcggtgagccccggcatgccgaggatgccggtgtagtaggacagcggcacgcccgccccctccccggccccgtggtgggagatcttggagaggagcctggtggcgggcggcgtcacgacgctgtagtcctcccagccggtgatgccccagacgaggtccccgggcgcgaggcgcgggtcggaggagtcgaccacgcgcgcgacgccgtagcccgtgatggtgtcgcccgggacgaaggcggccgtgtaggactcccgcagcgggcgcgacatcttgggccgcatgtaggggtcgcaggagaggtagaggttcctcacgaggacggacccggccggctcggcgcccgtcaggcggaggggaacctcggcgccccggagcagctccatgtgctcctcgcgagggtatccctccacgtactccttgaggatcacccgccggttcgtcgccgtcgtcgccatcggggcctgcttgtgctcggatctatccctctgcgactcgctgtgccgtgctctgctttcctccgctgaggatgattgagttcagtgtagtacttttgtttggatcctgcgatccgccgggggccgcaatatcccggcctgtgcaaatgcaataagtgatggtgaattattgggggacccgggcgggctgcgcagccttcaacggggcatgattagtgggtccttttggatacagatactagagatgttgcaattgaattagatataatactaaaactgtttagtactgaaaataaattttaataaaaatatcttgtttggatgtatttagaatttaattccatccaatacactaaag

SEQ ID NO: 5045 - DNA, 1900 bp, Zea mays
actgaagtattgtaaatactatagttgttttaaggcattctaaacttagctctggacctcagttttcaaaactgcggtattataaactacggtattgtcataactaaagtatagtatagtatttcaaaaactgtggttttcaaaaactttgttcccaaacagggccttacatgcgtaaccaatccgaatccatccctatagcctatgtcggtaggcggcccccctgaccgacgatgccacctcgtgttgcgatcagaggggttgttactgaccgtgtaggccgccacgctagcggtcggtacggccccgctttggcaccagtctatccccccctatgaattgtgctaatataatcaactctttcttgtgtgtgagcatcagaggaaaatagttctgtcctccatgtgctcatcgtgttatcttgagctgcagtgtttgatccgtcgatttgcttaggttaattagccactgcatagggtgtgtgattgtgttcgtgaggccagcaacatataggcctgcatctgcatggtctttgatttcacgtgatgtgtcttcgacagaacacaattgtagccgaatccaaacgtgtacgtccggcagcaacggggttgctgggccttcatgctcgtcgctcaccatcaccactcaccaaacggtgctagctagtatgccactgtccgcagtggacgacgagggctccctgtccctacccagacacacccactgcgtctctcctcgtgagctgcctaatcgggccacgtgacacagggtcacaatcgctgccagtaacaattgcaggtcactcaatccagcaaccaaacacaaaggaatatatatgtgatctggacagaacatgcaagagaataatagagatcagtaatattagcaagtgggttcacgggtatgctcacgtccaaaatccaacgacattttttaataagcggaatgtaatcgatccagacgggccagctcgagcaccacatggcgtggctccacctcgcgtccgccaccaccgctataaataccactggccatgcacacacgcactcccagcgctagcatagcagcagctcgaactagctttagctactacgtgtgcaagtgcaagcagcccactcgttcgaccatggctgcgagagcggcgctcctccagctggctgtcagcctggttatccttgccgccgtggcgagcgcgagcgcgaccaactgcccaccgccaccgctgccgccggccccaaagccgccgacgcccggcggccaccacggccacgggtcgtgccccaggaacgcgctgaagctgggcgtgtgcgccaacgtgctgggcctggtgaaggccaaggtaggctcgccgccgtacgagccgtgctgctcgctgctggacgggctcgtcgacctggaggccgccgtctgcctctgcaccgccgtcaaggccaacatcctcggcatcaaccttaacctccccatcgacctcagcctcatcctcaacaactgcggcaagaactgccccaacgacttccactgcgcgtagatcatcagtcagtcagttattgatcgtcgtccatcgccggccggccgtggttcatcgtcatcattccgttttgcttaattgttgatcgatcgtcttcttcctgtcagtcccagcagcttatttattttaaatttgtctctttatacatatatatgagtggtgtggttacacttctacatagcccaggcagcggctacgacgcgtgcgtgtatatgtctggcctggggtgatcagttaattactgatcggtgttgcgcagtagtgcagtacgtatattcttcatttgtagtcatgacgatctgtttgcatggttcgttcaataaatgaagttgacaagttgtactttctttctcaaaaaaaaaaaaaaaaaaa

SEQ ID NO: 5046 - DNA, 1170 bp, Zea mays
accactgactcgtccggcccaactgaacaccgaacctaacaggaggtgcctcttctcttcagttcttctcagtttctttcttgtgagggaggccaaacgatacaggaatacgatacgccgctcgcctgaatcgagaccaccaccgctcccgctctgcctcacctcgccgactagagtttttgccgccgcggatctcgccgtccccgccatggatacgtcgggctcctccgcagccgccggcgacgccccgaccaccggggagcaccggatggggaccaccattgtcggggtctgctacgagggtggcgtcgtcctcggcgctgattccagaaccagcactggaatgtatgtagccaaccgtgcttcagacaagattacccaattgacagacaatgtgtacgtttgtcgctctggatctgctgctgatacacaagtcatttcggactatatacgttatttcctccaccaacacacaatccagcttggacaaccagctactgttaaagttgcagctaacttgattaggttgctagcttatcagaataagaacatgttgcaagctggcatgattgttggaggatgggataagtacgagggaggccaaattttctcagtccctcttggtggaacgatcttgaagcaaccatttgcaattggaggctcaggttccagttatctttatgcacttcttgatcatgaatggaaagagggaatgagccaggaagaggcagagaaatttgtggtgaaggtagtttcccttgctatggcccgtgatggtgctagcggaggggttgtccgtacagttacaataaatgcggatggcgtgaagaggaacttctaccctggcgacaagctacccctgtggcacgacgagctggagccccagaactcgttgctcgatattcttgctgccgggaaccctgatcccatggtgcagtgaatttgccctccacttccgttgtgaacttttcactgtacctgacttgttcttgatttcaaccgaagaaagaattggaacatttcctgtcgaactaatgtcgcgccagagtatttacatactgttgttatcacaccttagtaaattcatggttactactgctgtcgtcgttttatctggcgagtatgcgattttgtcagccgcctacttatatgcggtactgatgcatgagt

SEQ ID NO: 5047 - DNA, 1036 bp, Zea mays
  misc_feature (4)..(4): n is a, c, g, or t
  misc_feature (25)..(25): n is a, c, g, or t
  misc_feature (74)..(74): n is a, c, g, or t
gcanacttatttccttctgtcctcnagccaactgtctctaactatcctcgcttcctggtgctctgcaaagaacnccattatctcctcagcagctcttctgttttttttggtaaggaagaagctgcgtggaagatggaagaaattctgctctctccgtcttgttcgaaactaactttcctatcccgcccctttgttgcatatctggcatataccatagtccatatccgtcgcatatctccaggcttttatgttcatctagcgctcctgcattgcatctagtgcccttagtcagttagcatgctcattcgttcccacttcaagttcacgaaccagtttgagggttctgattttcttaaaagcgtcgaaagagagtctggattctggatcccttcgtgcaggcaaaccctgatgaggttgctctgtaatgacataacgctcaagctagctcgtgccggtgttacacgcttctgtagccctgcgcagttttagcactagcagtgaagcagcagtactgctggatctagattagtagtcatcggaaatgccgaggtttggtcagttatcttgtgctctggtgttaaatcagcagatgacattgtgtcgttgttacttcagtaacgtgatataacggtcctatgtcgtgaaactagctcatggtgttagaactagaaaccatgttgctcagagctactgtgttgatgttgcacctgctgagcctgtcatggctgtcactccttgaggattattttggttattagttcgtcggcggagttgcggagtttcgtctctgcgtttcagataagacccttgatgagtagctagagattgcagtagtcactactgcgttgacgcgtttgctcagctcagctcgtgtgtgctaaaacccgttcgatcgctgcagtcagactcagctcgtgtgtcactctattggcgtgtcatgtaagaggtcgtttggtttgagtgaggaatgaagtgattcatctttttgtccctcctcacttttttatttggtttatggaatagaatggattgatcc

SEQ ID NO: 5048 - DNA, 2029 bp, Zea mays
aggtctagagtagagaggtccaggccttcgcccgagccccgccagccactaccaacttgggacgggcaggccggccagtgtcacatacaggcccagaagccgtcagaagacatccggccctaggctaggcgcacgggaggcagacgaggcgagaagtggcaactggtacctttggggaggcgaggaaggacacgaggtcggcgcgttcgtgcgtgcctttctcactgcacgccgatccctctctccgaaccccgccgcccgccgcagatccgagggtcatcggcagccatgatctcgtccagcaagctcaagtctgtcgacttctacaggaaaatacctagggatttgaccgaggcatcactatctggcgctggattatccatcgtagcagcattagcaatggtttttttgtttggaatggagttgagcagttacttagcagtcaatactaccacatctgtgatcgttgataggagttcagatggggagtttttacggatagatttcaatatgagctttcctgcgctttcatgtgaatttgcatcagttgatgttagtgacgtgctgggaacaaacagattgaacataacgaaaactgttcgaaagtattcaattgatcggaatttagtaccaactggatcagaattccaccctgggcctatccccattctcaataagcatggagatgatgtcgaagaggatcacgtggatggtgcattttcattgtcatctcgcaattttgatagcttttcacaccaatatcctgttttggttgtcaacttctatgctccctggtgttactggagcaatcgactgaaaccttcatgggagaagacagcaaaaataatgagggagagatatgaccctgaaatggatggtagaatccttctaggcaaggttgactgcactgaggaagttgaattgtgtaggagaaaccacatacaaggatacccatccattcgtgttttccgtaaagggtctgatataaaggagaatcagggtcaccatgatcatgaatcatactatggggaacgtgatactgagagtttagtcgcggcaatggaaacatatgttgcaaacatcccaaaagaggctcatgctttggaagacaaatccaataagactgttgatcctgcaaagcgccctgctccaatggccagtgggtgcagaatagaaggctttgtgcgtgtcaaaagggttccagggagtgttgttatctcagctcgatctggatctcactcgtttgatccatcccagataaatgtttcgcactatgtgacacagttctcatttggcaaaagactttccccaaggatgctgcatgaattcataagacttactccctatcttcgtggataccatgatagactagctggccagtcttatactgttaagcatggtgaggttaacgccaatgttactattgagcactacctacaagttgtaaagactgagcttgtaacacagaggtcctcaaaggaactgaaagtgcttgaggaatacgaatacacagcacacagcagcttggtgcacagcttctatgttcctgttgtgaaattccattttgagccttctcccatgcaggtcttggtaactgaagtcccgaaatccttctcccatttcatcacaaatgtctgcgctatcatcggtggggtcttcacggttgctggaatactggattccatctttcacaacacactcaggatggtgaagaagattgagctaggaaagaacatttaaatttcgacgccgctgcaagtttaggcggatgcactaggtagccattgttttgttataactaggtaatgactcatgaaaatcggtatatgaaagatggcgtgctgaattgacggttgaaattcggggggtcatgaaatcatcatataataactagggatctcactgtttcgctaaaccactcacaataagacagtggattgctgctagtgtgccactgtgataagtaaccgagttggataatatattcagtatattatcttgccgtgctaaaagggggggcccggtaccc

SEQ ID NO: 5049 - DNA, 1755 bp, Zea mays
  misc_feature (22)..(22): n is a, c, g, or t
accggtaacaaaacatcccggngtcgacccacgcccgcccccccccccgcccgccctcaccctcgacgccgcgctcctccgcatcgccaatatcgccgacctctcccacctcccagaccacctcctcatcgatctcttccgtgtgaaatcatatcacagtcacagccacacaggagtgtgcgggctgatgtcctcttatgcttatgctgcagaggattcaacattagaacacattttgtaatgtgctcttgcatttttattgcagagaaccctcagtgctggtaagctgacagagaaagttctcaagttgtttctagcaaccggctgtgaggatatcatattggctgttcggttgctcaacattaagcagccactcgtaccagtccttcccacaaggtgctctgagagattctagacctgctgccgttcacattgttttgattacctgagaagatgcctttggaaattcaagatagtgaggttgacattgtgattgcggcactccggcccaacctgaccactttctttgaggcatggcgaccatttttctcccgtttccacatcattgtcgtcaaagatccagacatggcagaggatcttcaaatccctgcaggttttgatctcaaggtttacaccaagtcagatattaatgggttgcttggtgcctcctcatccataaacttatctggtcactcatgccgttactttgggtatcttgtctcacgcaagaagtatgtgatttcaattgatgacaattgcctcccagcgaaggacactgctgggtcgactgttgatgttgttgcacagcacatggccaatctgaaaacacctgctacacctttctttttcaacacactctatgatccatacaggaaaggtgctgactttgtccgtggttacccattcagcctgcgcgagggggttgagtgcatgctctcgtgtggtttgtggcttcataatgctgactacgacccgatgactcatgttgtgaagagaaatcaacggaacacaacatatgtggatgctgtgatgacggttccgcttggtgccatgctgcctgtgagcgggataaatgttgcattcaaccgcgatgtgctggggcctgctatgttcccaggcctgcgtctacgaaacgaagggaagcacagatgggatacccttgaagacatatggaatggcttatgtgctaaagtagtctgcgacagcttgggatatggtgtgaagaccggactgccttatgtgatgagaagtgatgcagaagcaggtaaagctctggagagcttgaaagagtgggaaggggtaaaagtcatggatgatgttctcccattcttccagtcgctcaagctatcgaggactgcagttactgttgacgattgtgttaaggagcttgctggagttgtccgtgagaagctaggacctaagaatgcaatcttcaccaaagcagccgatgccatggtggaatggaacaatctctggaaagtgcatggtgctcagaatgcatagtttgggagtttgcatgtttcctacagagcatctaatagttgtttggagtgcgcgttttacagttctaaattttccctgtggaactcatgaagctgaaataaacaacagtcctttatgccgtgaatttggcatgaatagctgagcatctcattgtatacgcttaagaattatgtaatgtaatgcatcaaaagaacatgtgatgttttcttgcaaaaaaaaaaaaaaaaaaaaacccgcgggggcccggtaccc

SEQ ID NO: 5050 - DNA, 1319 bp, Zea mays
agtctggtaccgccggcaaagcagtcgttttcgtcctcttccttgattaaaccttccgtacccatatccacctgctgctccgaccttccagtcttctccgtaggggcttcgctccatagatttcgccgcaaggggcaacggcacacccaccaactgacctgacccacgagggatccgcagatgaagatcattccggtcccttgcctggatgacaactatgcctacttaatcgtggacgagagcaccaagaaggcagcggccgttgaccctgtggaaccggagaaggttctcaaggcggccggcgaggtcggcgcctacgtcgactgcgttctcaccacccatcaccactgggatcatgctggtggcaatgagaagatgaggctgcaggtgccagggataaaggtatttggaggatccctggacaatgtgaaaggctgcactgatcaggtggagaatggaatgaagttgtcacttgggaaggacattgagatactatgcctacacacgccttgccacactaaaggtcatatcagctactatgttactagtaaggagggtgaagatccagcggtcttcaccggagataccttgttcattgctgggtgtgggaagttttttgagggttctgcagagcaaatgtatcagtcccttattgttacactgggttcgctgccaaagtcaacccgagtttactgtgggcatgagtacactgtgaagaacctaaaattcatgctgacactggagccagagaatgagaagacgaaacagaaactggaatgggctgaaaagcagcgcgaagcgaatcagccaacagtgccctcgactataggagacgagtttgagataaatactttcatgcgtgttgatctaccagaaatacaggcgaaattcagtgtcaactctccagttgaagcaatgagagaggtcaggaagaccaaggataattggagaggttgaggacacccatggccgccactagtctgttgaaccagcattccaaagtgaactaatgcagaaaccttgccctgtaggtgggaatgaggtttactgccgtgcaatgctttgagaaatgtgttgttgtgaaggagaagactcctacaataagctccgcgttaatgagtagtaacaatacgctccttgtaacttgtggtctgtttgccaataataatgtacgaactgtagtgcctatcttgaaaatatgaagagctataatgggtataacctgcctgcattttatatttattcagggatcatcagtatatggattatgatcgatgcatacagatgataaagatggatgagctgctatgctttcactg

SEQ ID NO: 5051 - DNA, 2545 bp, Zea mays
cccacgcgtccgaacgtcttgtaattcagcttgggaagaagatggttgagatgactggtgacttcactccagatgtgatggccctattgtcagctgacatcatcatttctacccctgaaaaatgggatgggattagtcgaaattggcatagcagaagttacgttatgaaggtcgggctcatgatattggatgagatacatcttctgggagctgaccgtggacccatccttgaggtcattgtatcaagaatgcgatacatatcatcacaaacagaacgttcaattcggtttgttggtttatcaacggcattagcaaatgctcgtgatttagctgattggttgggcgttacagatgacggtctattcaatttcaagcctagtgtgagacctgtacctcttgaagtgcatatccagggatatcctgggaaattctattgtccaagaatgaatagcatgaacaaaccagcttatgcagccatatgcactcattcacccagtaaaccaggtctcatttttgtgtcatcacgtcgacagacaagacttacagctcttgatatcattcagcttgcagcatcagatgaaaaaccaaggcagttcctgagcattgaagacaactccctagacatggttctttcacaggtttctgacagtaatttgaggcatactctgcaatttggcataggtctgcatcatgctggtttaaatgacagagacagatccttggttgaggagcttttttcaaacaataagattcatgtgctggtatgtaccagcacattggcgtggggtgtcaatcttccagctcacctggtcataatcaagggcactgaatactatgatgggaaaacaaaaagatacatagattatgatatcacagatattctgcagatgatgggtcgtgcaggtcggccgcaatacgaccaacatggcaaagctgttattcttgtccatgaaccaaaaaagagcttttacaagaagttcctctacgaaccgtttcctgtggaaagtaatctgagggagcacttgcatgaccacataaatgcagaaattgtttctggcaccatcagcaacaaggaggaggcgattatttatctcacctggacttacctatatcgcagattggttgttaatccggcctattatggattggaggatactgaaacaaacacattgaattcttatctatcaaggttagtcgaaactacatttgaagatcttgaggacagtggatgcataaaagtggatgaccactctgtaaagtacttgattttggggaaaatagcttcacagtattacctgagctacctcactgtttcaatgtttgggtcaaatattggccccaacacaacgttggaagtctttctacacatactgtcagctgcatcagaatttgatgagcttcctgtacggcacaatgaggacaatttgaatcgaatactcagcggaaatgtcccgtatccagttgatcaacaccaccttgatgatccacatgttaaagccaacttactctttcaggcacatttctccagagcagaattgccaataagcgactatgtcactgacttgaaatcagttcttgatcagagcatacgcatcatacaggcaatgattgatgtatgcgcgaatagtggatggcttacgagtgcattgacttgcatgcatctcttgcagatgatcatacagggtctctggtttgagagagattatgaatccctctggatgttgccatccatgaatgatgatatattagaccatctcaagagtagaggagtctcaacagtcccctccttactagatctttcccgtgaagaattgcgtagggtacttcaaccattttctgcgtcagagttgtatcaggatctgcaacatttccctcatgttgatgtgaaagttaagcttcataatgaacaggagcgatccaaacctccaactttaaacatcaggttgcaattgaaaaattcgcgacggtcagcatcaagagcatttgcccctagatttcccaaggcaaaacaagaagcttggtggctggtcctggggaatgctacaagttcagagctgtatggtctgaaaagaattagttttgcagatcgggtgattaatactcgcatggaattgccacagacgttcaatgtgcaggagacgaagctgatcttggtgtcggattgctacctaggttttgacttggagtattctcttgagcatctcaccaagggttgagtgctttattcagagctgtttgggctgtttcattttctatgggttcagcaaccagctcatcctagattgatcctgtaatcacgagacatgagttcattccatgaatttttgtttgtatgactacatccctcgtgttcatggttatattatatttaatagctatatatacgagtggataggtttataactttcatgaaatatcttttccgtaagcatagtagatgtttgagctctaaggttatgaccaacaaattgtgtatatggtcgtgcaaaatactattttataatataaactatattatttacatggtgaagtttgagagggcggc

SEQ ID NO: 5052 - DNA, 1748 bp, Zea mays
cattgggtacctcgaggccggccggggcaacactctcctcccgggcctcccccgccgaaaaaaacatctcctttgtatcggcctcggcaatcctgaccggatcaacaaagacgtagctaccccctcccgcgtccgtcgaattcgcctccgccgcctgctcgatccggtgggaattcgccgctgccgggttgttttcgctggggtgattaaggctcgggattcgagatctacgcgagtcgcgggcaagcagccatgagcgaggtgttcgagggctacgagcggcagtactgcgaggcctccgcctcgctctcccgcaagtgcaccgctgcctccgccctcgatggggagaagaagaagcagaagctgtccgagatccaatccggcgttgaggaagctgaatcgctgattcgtaagatggacctggaggcaaggaacctacagcctagcattaaggctggtttgcttgcaaagctgagggagtataaatctgacctcaacaacgtcaagagtgagcttaagaggatctcagcgcccaatgctaggcaggctacccgggaggagctcctggagtctggaatggctgatactctcgcggtgtctactgatcagagggggagattgatgatgacaactgaaagactgaatcagtcaactgacagaattaaagagagccgaagaactatgttggagacagaagagcttggtgtgtcaattcttcaggaccttcaccaacagcgacagtcactactacatgctcatactactttgcacggagttgatgacaacattggcaagagcaagaagatcctggctgcaatgtcaaagaggatggataggaacaagtggatcattgggggaattatcacggctctcgttctggccatccttctcatactctacttcaagctcgctaattaagcctctgcctgcaggtaggtcccccctacatatctgtgttcagtaattgtgtgatatgagttgtctgaatgccgtgtattgagcaacacgcagctctccgagcgtcatttgttccccctcaaacctgtaaactcaaaatggcttattctgtgtatagtctgttattcccaactatgtaaaatgtctaaagagtaaaaaaaataatacttggtgttgagtctcatgtgcacatcgcacgttgttctgtcatgttaaactagagtggttactagagcagtatgtactacctctgtcccaaaacaaatcaacttctaaagttgtcatccctaagtcaaactattttaagttcgattaaatttatagaaaataccagtgtttgtaataccaaattagcatagttagatccatcactaagtatattttttataatgtatttatgtagttctatagacgttgttagttggtctttcctataaattaaatttggtgaagcctaagatagtttgactataggtgattataggtttactttgggaaggaagtagtagtaactattgtgtgtgcatcagcctatttgaactgctgtcgctgtctgccttggaattattgtgattaggcagctctgcggctagtctgttatggttgtcgtgctagtgtttgtgcagatgcttcctgaatgattgagtggtagaataggtgggccttggcagctagctagcgtgcatgcgcagaaggtgcaggtctatcggtgctgcagtaacttgagtcgcagagctaggttggcatgcaatgcaagtgggctaagcgatgaggcaggcgcatcttgtgca

SEQ ID NO: 5053 - DNA, 1861 bp, Zea mays
gctgggaggtggcttcagctacggcgacctagctcaacatgggccactagagcagagaccaccagttgtactcttcatttaagtctcaccagaatgtacgagacgagttgttcatcatcaacaatcttctttgcaaataccatctcttctgcaagagagattatcttgacaatatattctagtgtcgatggactgtatatttatacaggcaggagccgactattacaagaagaattctactcgttacaacatactaaccaactaaataaactggacacatgcaattctgttttggtcttatttgtaatctataattagagctggttttttatctagcccaagagaatcctgggcaactaaggttgtagcctatgtatagcatattctaacagatggtttgcctgcaaatgccattactcagcactttgcattcttttttggccgtttccatcttttttttcttctatcagtcatcttttctgatttatgcaggtaagcggcatagtaagaaatatcgtgagagattggggtgatgagggtcaaaaggaacgtgatgagtgctataagcccattcttgaggagcttaatcgcctttttcctaaccggagcgatcagaggcctccttcatgtcttgtccctggtgctgggcttgggagattggctcttgatatatcttctctgggttttgtaagccaagggaatgaattctcatattacatgctgatctgttcaaatttcatcctgaaccacactcaagaagctaatgagtggtccatatatccttggatacatagcaactgcaattctctttctgacaacgatcaacttcgtcctgtttcatttcctgacattcatccctcaagtgcaggtatcacagagggattttcaatgtgcgctggggactttgtagaggtctacagcgaggaaagccaagaatctgcatgggatgctgttgtaacttgctttttcctggatacggcacacaatatcgttgaatacatcgagatcatatcaaaagttctcaaggatggtggggtctggattaatttgggtccccttctgtatcactttgctgattcatatgggccagatgatgatatgtctattgaattaagtttggaagatgtgaaaaaggttgcttaccattatggatttacaatggaggtgagggtttctgcattaaatctattttttttaaagagttgttgtgatagcatacttcgatatgtgatttgcaggtggagaaaatgatcgagactacttacactgcaaacatgaaagcaatgatgcagaatcggtaccgtgcagcattctggacaatgaggaaagatgcatctcggtcaaaagcttgtaagcctcgttgaagtgaagatcatccatggcggacgatcaatttgtgccatcattattcactgttgtattcaaactccacacaggccgtgccagactaagttagatagatatatcagatgagctgcctgattcacagaatataattggcttaacataggaaaggaggtgctgagccacgctagctagctcatccttttctcctatatcacagatattcaaactgtactatgaactctgtaagaatgagcaataaactaagcagacagaagttaaaaatagaagtaacagaaatttaaaaaaaaaaaaaagtggcgccgttgccggggatcccgggtcgcccgcgtgacaggcgggagtctcaccactgtaacgactgggatgcctagggtttagtggatgtattgttccacgactaatgtttagtattggaagtatgatatatagtgtaattataaaactaatcgtatgaaggaggaaagataaacgaattgatcaagtctaaaaactt

SEQ ID NO: 5054 - DNA, 1872 bp, Zea mays
atccccctgcactaccattggattaaggctaggaactattcgtgactaatccatgttaatacaaataaacaaaacaattctgcgggaacgaactcaacaaaaccgtttcataataaatgaacaaaaatggtagattgaactgtttacaaagtggaatttgaaataatgattgggatagaggatgagatagagagtgttggagatagtattaagtacttgtgacgcaccagtatatatatgtatgcatatataataattaatatatacaattaataaaaaaaagttaaagaaaatcagtgccggattagattgcaacggcaaatcgcatcacatgtccaacaaaaatatctggaactgtacgacattccatgatgacccgctgcgtgccgcccggccggggcctccctgtttcctttcctttttgcattcccacccacccatcccctcaaaattcgcagcgtgtctcttcctccatcgcagcgtgtctcgtgctccccccaggctcctcttcctcgctttccctccaccccgggcgcaaaccctaaccctaccgtcgctcgccccgcggcgtctgccaatggcgcgccccgtgtgagtgtgcgcgagagaggggtagaccttgaggccgctacccggggaggagagcgagagatgtataaacaggggggagcggggggaggggctgggctggaccggaagcggatcaacgacgcgctggataagcatctcgagaaggcggtcgcgtcgccgtccacgtcgagggggtcggcgggcggcgggcgcgaccaccaccgcctcgtcgtgccgtcctccgtgtcgtccatccccaagggccgctgctccgaaggggagtctgattctgatagtgaagcatcggatgttagcggctctgatggagaagacacctcatggatttcatggtattgcaacttaagagggaatgagttcttctgtgaagtcgacgatgattatattcaagacgacttcaacctttgtggtctcagcagccaagttccttattatgattatgctctcgatctcattttagatatcgagtcatctcatggtgatatgttcactgaggaacaaaatgagctcgtagaatcagctgcagagatgctttatggtctgatacatgcacgatacattctgaccagtaaaggactggctgcaatgctggagaagtataagaactatgactttgggcggtgcccgcgtgtttactgctgtggtcaaccatgcctgccagttggacaatcagacatccatcgatctagtaccgtgaagatatactgccccaagtgtgaagacatctactacccacggtccaagtaccaaggcaacatcgacggcgcatactttgggacaacgttccctcatctgttcctgatgacatacgagcacctcaagccacagaagctctcgcagcgctatgttcctcgtgtctttggcttcaagctccacaagccatgaacctcatgtatttgtcttttaaactcctcaaaacgtggcactgggggcatgcgggagttttgcaatccttgaagacttgcatataagagcgccattggcaggtcagtggattggtaaaattctatcatgctgcagcgtgcttgtaccttagctggctggcacctatccaacatttgaatgtagctctaaggatatcaatgttgtaacctaactgctattgttctttgattagtaaaccaggagccccccctacaatgtagaatatggcaattatttatggctttgcagaaaataacaacccttcatctgcttggttctcgtaagatggccctttaattttgtagtttgcgaacttctattttgaaatgtgatttgcaaaggtgcgtcatctcaaaaaaa

SEQ ID NO: 5055 - DNA, 2852 bp, Zea mays
gtttctatatttggcaattttggaactaaattggaataaaatctagggactaaacattagtccctaaaaaccaaacacctcctaattattttgctcaattctagctatagctttaccccaaaccgaaagtggcatccgaaagatcaatttattttgcactccgctgttatatcgacgtgcaccaccgtcttgccgtcgctcatttcctcctcgctcggctgcttgcctagggtttcacctgctaccgccccacctccagccgtcgcttcagatcccgccgctgccggcgctcgatcctacttcgttgctcctagctgatcccgctgagctcggatttgggcccttcctcaccgccggaacagcgtccggacgcgcgggggcagatctgggttttggtggcccgcttggtgtatgagaaggcctccagagcttggaagtaatggaggtggagccggcgaggagggacgctgcagcgctggacccggagctgctgcagctggcggagctcgcgccgggcgcgcttcgtgagaactccatagctgatgagctgtattcgcagtggctcgtgctacccgagacgaccaagctggtgaagtctttgattgatgatgcaaagactggtgctgtgcttaatgttgctggaagctctgctagcacaaatgctgcttcaagtagttctctaccttcgatgtttcctgctggtagtgctccaccactttctcctaggagcacgtctggttcccctcgtgttataagacgaggatctggagctggaccatcatccttgggttctccattaaaattagttagtgaaccagtaagagaagttatacctcagttttacttcaagaatgggcgtcctcccacaaaagatttgaaggagcagtgcttatcaagaacagatcacctattttttggtggtggcggacttcaagttcaagaattcagatcggtcacgaaggacatatgtaaacttccttcattcttgtctagtgtccttttcaagaaaatcgatgttgaatgcactagaactgtctcaagggatgcatttgttgagtactggattaacgacaataaggttacaatggatatggctagtcaaatatttgaaatattaagaaagccaggttacacatatctcacccaggatgatttcaagcctgtcctgaaagaactactggcaacacaccctggcttagagtttttacaagggacccccgagtttcaggagagatatgcggagactgtaatatacagaatcttttactccataaatagatctgggaatggtcatctgactctgagagagctcaaacgtggaaatttaattgctgcacttcagcagttagatgaggaagaagatatcaacaaagtgttgagatatttctcatatgaacacttttatgtgatctactgcaaattctgggagctggatgcagaccacgattttttgattgataaggaaaatctcatcaaatatgggaaccattcgttgacctatagaatagttgatagaattttcgcacagatcccaaggaaattcacaagcatgacagaaggaaagatgggttatgaagactttgtttactttatattatcagaggaagacaaatcatctgagcctagtcttgaatactggtttaagtgcatcgatcttgatggtaatggtattttaactttcaatgaaatgcaatttttctacgaggagcaattgcaccgaatggagtgcatggcacaagagcctgtgctttttctggacatattatgccagatgattgatatgattggaccagagaatgagagctatttaactctacgggacttaaaacggtgtaaactctcaggaaacatattcaatattcttttcaatctcaacaagttcatggcgtttgaaactcgtgatccattcctcattcgccaggaacgtgaaaatccaactctaactgagtgggaccggtttgcacatagagaatatattagattgtccatggaagaagatggtgaggatgcttcaaatggaagtggtgatgtgtgggacgaatcacttgaggctccattctgaatggcgtcttgctgcatgaatttggttggacatggatgattatggttgtgaagcggaaggattgtaaatttggtggctaccctgttgaggccattgtaggctcacagcagattcagtaacatcaaaggctactgaaaagttttactgtgcagatctgattcaatatttgtcagttatcttgttgggcaaacatttttgctttgctggaaaattggggagggaggttggtgggggcgccctgcagtttcaaggcaacaacctcagcagtcatcaacggtcgactccatttgtgttctgattgatccttagggggatatctgttattcaattgtgcgcaaattttggggctgaactgttaatgtttggctgctatttctttgttaaatcttggaagcgcaggctaccaattccatcacacaactaagatcatggcatgtagctttcaggttctgctttctcatcagcatggtgttctgtagttgtgttgccattcttggtgcatcttgggaggaatgatccgtgaccttgaagcatggatacttgtcattttgtaacattaccgagaagcagtggattgggtgcatagtaacacaggttgtaacgttaccgagaagctgtggattgggtccaatttttgttaaggtgtaaatttggagaatattttaggttatcttacttgaaagtgctttgcgctttgcgtattgagctacttatgtcgtgatgcgctgaaactccatgtgtgtattcttgttgtattttccattttgtcaaggatcatgttttcttgcct

SEQ ID NO: 5056 - DNA, 1235 bp, Zea mays
cattggggaccctcgaggccggccggggcccccggcggctctcggaatagagtggcctccctctttttcctcgcactccgcaagacgcaagaccacctcaccagcctcctcgtccccgatctcctcccacccgcatccaagggtttccttctcgaccgtgcggaacgagccagagaacaggtatggcggcggcgcggcacctcagatccggcctccccctcctccgcgcccacctcgcatcctccgaatccgcggccgtcgctcaggtttcgaggggcttcgcgtcgcaggccgccaagcccaccgggaaggagatcaaggttccaaaggctctgtttggcggcacaggcaactatgccagtgcactgttcctcacagcagctaaatctaatgcattggacaaagttgaatctgagattaaagctattgtagaggcttccaagaagagcccgttgttttctcaattcataaaggacttgtcagttccaaaagcgaccagggtgaaggctatagccgaaatatttgctgacgctgggttttcagatgttacaaagaatttcttggctgtcctggcggacaatggcaggctgaaatatattgaacgcattgcggagagatttgttgatttgactatggaacataagggggagatgaaggttgtggtcaggacagttatttcactcaccaaggaggaggagaaagaactcaaggaaaccttgcaggatatccttggggaaaacaaaactattttggttgaacagaagattgactacagcatcatgggaggattagtgattgaattcgggcagaaggtgcttgatatctcaatcaggaacagggcgaagcaaatggaggcgttcttgaggcaaccacttgacttctaacagccttttggataaaagaagcatcatcggaatgcagaggctgtcctgttgaaggttttcctgtgtctgcaattttaatctggccttttgaataaaatgtttcctctaacaagtgaagggcactgtttttattgtctcgtgggccacagatgcctgctgaacaatttatgttcatttcttcttttcttaaagaagcatgcactaagaacatgaaggatgcatgccatggaaagtttttgaaagtcattgaaacgtatgagctcctcatgcaatgcattattctccttatattcaaggatataaatgaaaatccagcgattgcaaacgaaaaaagaaaaaaaaaaagcggcc

SEQ ID NO: 5057 - DNA, 2425 bp, Zea mays
gccggccgggtctcgataactgccctgccctctctcccatcaccaccgcctgcgactgcgagctcaaagacccacccacactgagctgcccaaatccacattcccatcggcgcagacggccgggaggaggatgtccatgccggagacgttcaccctgaaggtgggggaggcgacgccggccgccgccggcaggccgtcggccgggcccgtgtaccggagcatctacgccaaggacggcctcatggacctcccacaggacatccagtccccttgggacttgttcagtggggcagtcaagaagtaccccacgaacaggatggtcgggcagcgtcaggttacagatggcaaggccggtgagtatgtgtggcaaacgtacgaggaagtgtgccagaaggtcatgaggattggatcagcgatcagaagcctgggcgtagagccgggagctcactgtggcatatatggatccaactgcccggaatgggttatggccatgcaggcatgtaacagtcaagggatatgttatgtgccactgtatgacaccctcggagctaaagctgttgaattcatcatgtaccatgctgagatatccattgcctttgtccaggagagcaagatcaaatcaatactagcagttctccctaagtgcacagcgcaccttagagccattgttagtttcggagattttgcaagcgagatgaaagcggaagctgagagattgggcgtctcctgcttttcttgggaagagttttcttcaatgggaaaacaagactaccaacttcccaataaacgtaaggaagatatctgtacaatcatgtataccagcggaacaactggagatcccaaaggtgtgataatcacaaacaaagctatcgttgctggtgttatgaccacagaacacctcctcaaagagaccgataaagtgatcacagaagaggattcctacttttcctaccttccattagcacatatatttgatcaagtaattgagaactactgtatttctaaaggagcctccatcggattctggcaaggggacattaggtacctgatggaggatgtgcaagtgatgaaaccgacaatattctgtggtgttcctcgtgtttatgatcgtatatatacaggtataaacatgaaaattcagtctggagggatgatagccagacacctttttcagtatgcctacaactacaaacttgccaatatgaggaaagggctgaaacagcatgaagcatcaccgtttttcgacaagatagttttcagcaaaataaaggaagggcttggagggcgtatacgtctcatgatagctggagcagcacctttgccagggcaaatcgaagaattcatgcgggtaaccacctgcagcgttgtagtacaaggatatgggctcactgagagttgtgcaggatgcttcacgtcaatcgccaacattttctcaatgattggaacagtcggccctcctgtcacaacaatagaagcacggctggagtcggtccctgaaatgggctacgacgcactgtcagacacgccccggggcgagatctgcttgaggggccacaccatgttctccgggtactacaagcgccctagcctcactgaagaagtgttctcagatggctggttccatacaggtgatatcggggagtggcaatccaatggcacgatgaagatcatcgacagaaagaagaacatcttcaagctgtcccagggggagtatgtggcagttgaggtcctggaaagagcatacctgcagtcaccccttgtggcatcggtctgggtctacgggaacagcttcgagtcgttcctcgttgccgtggctgtccctgagaggcaggctctcgaggaatgggcagcagccaacagcaaggccggcgactttgcagagctgtgcgctgatcccaaggcgaggacctacgttcgggatcagctgaaccaaactgggaagaaacttgggttgagaggcttcgagatgctgaaagcagtctacctggagccggtgcctttcagcatcgagaaggacctcgtcactccaacctttaagctcaagagaccccagctgctcaagtattacaaggatcgggtcgaccaaatgtacaaggatgccaaggaggggagagctgcgccatgagcccatgacggcattgccaatttgccacgagtggctatgatcctgagcattgtgattcctcgaaagcgtgtacatattgattatcacaatttgtaagtttaaggcatgtgtgttctatgccaaaatgtcagcagaaaatgaattggctaagaagctcgtgaatcgtgatagcttacattaataaatttattaagctagtccattaccttcacactcctcacttttttgttttggccccgtttgtggaatagaagatgagtttatccaacaaaaaaaaaaaaaaaaaaggcccctagggcc

SEQ ID NO: 5058 - DNA, 2202 bp, Zea mays
  misc_feature (1879)..(1985): n is a, c, g, or t
  misc_feature (2054)..(2058): n is a, c, g, or t
  misc_feature (2075)..(2079): n is a, c, g, or t
  misc_feature (2083)..(2087): n is a, c, g, or t
  misc_feature (2101)..(2105): n is a, c, g, or t
  misc_feature (2109)..(2115): n is a, c, g, or t
  misc_feature (2132)..(2176): n is a, c, g, or t
tacgggggccccctcggacccggcccgggacttcaggttcttcccccgatcttccccgctcagcttcgcgtaattgcatttaagcccctttggcactcattgccgtccccctcggctccatttcttggaggtgaccgcagctctccggcggaaggcggcgcagatggcttccgcggcgacacagtgcttcagctactcctcgttgccggccacgtgggctctgcggcagcggggcggcggtgccagcgtgctccggctctcttcccggcggaccttctcggtctccgcggcggccgggttcgacaaccagaaccgcgagtatgtgatcgtcgggggagggaacgctgcgggttacgccgccaggacgttcgtggagcatggcatggctgacggccgcctttgcatcgtctccaaggagccagttccaccatacgagcggccagccttgaccaaaggctatctttttcctccggacaagaaaccggctcgcctacctggtttccatacatgcgttggatctggtggacagcgacagactgctgaatggtacaaggagaatggtatagaggtgctgtatgaggatccagttgtagcatttgatggcaaaacgcaaaccttaaagacttcatcggggaaagttctgaaatacggctcacttattatttctactggatgtgaagcatcgagattacctgagaaaattggagggaaattacctggagttcactacatacgggatgttgctgatgctgatgctctagtatcctcattgggaagtgcaaagaaggtggtggttattggtgggggctatattggcatggaggtagctgcagcagcttgtggctggaatcttgacacaacgattatattcccagaggaccacattatgccaagattatttacgccctcgcttgctaagaagtatgaggaactgtatcagcaaaatggtgtcaaattcataaagggagctcttatcgaaaaacttggagctggctctgatggaagggtgtcttctgcagtacttaaggatggatctgtagttgaagctgatacagtaattgttggtataggagcaaaaccagttgtcagcccgtttgaagctgttggagttaaccctaaagttggtggaatagaggttgattccttgttcagaactagtgtacctggcatctttgcaattggagatgtagcagcgttccccctgaagatgtacaatagaattgctcgagtggaacatgtggatcatgctcggaagtccgcacaccactgtatagagacgctcctaacatcccagacaaaagcgtatgactaccttccatacttctactcgagggtttttgagtacgagggaagttcgaggaaagtctggtggcagttttatggcgacaatgtcggcgaagcagtcgaagtagggaactttgatccaaaggttgcgactttctggatcgactctgatagccggctgaagggtgttttcctcgagagtggaacctcagaggaattctcgcttcttccgcagctcgccaaatctcagcctgttgttgacaagtcaaagctccaggccgcgacttctgttgaagatgcattagagattgcaagaagctcactccggtccagcgccacggtttagatctcagaatctagtactttcttgaacccaaggctgtgcgctgctcgagcggttcatagcgtcgagaccacgtcagcaataacgcacaattacatagaatctattcccactggggttgtaacattcttcagtgcacctgggtcggccatttccagcttgaaataaacctggttgccctttgaggggttgatgaggatgatagattgaagcctttatgctacttttttaaaaaaaaaaaaaaaaccacannnnnnnnnnnnnnnnnnnnnnnnnnnnnnnnnnnnnnnnnnnnnnnnnnnnnnnnnnnnnnnnnnnnnnnnnnnnnnnnnnnnnnnnnnnnnnnnnnnnnnnnnnnttatttacccgtgaatgcaacgtcaaaccccttcaaaagggccaccaaaattcaattcacgggccgtcnnnnnaaaaccccgggacgggnnnnncccnnnnntaccccaatttaannnnnttgnnnnnnntccccttttcgcaagtnnnnnnnnnnnnnnnnnnnnnnnnnnnnnnnnnnnnnnnnnnnnntttccccaccctgaaggggaaagggg

SEQ ID NO: 5059 - DNA, 4472 bp, Zea mays
ctagcataatccatcgttaccagagatggaaatggcggcgacttctgcggagacaacaacccagatgacgctagactactttccactctcggatccctgactaccactcgtcaggcgtccccgcctgcagtgcgggtctaatctagccccgcgaattccccaattttcgccgctccaattcgctcatccgtccgcgcgcccctcgccgaccggccggcgcggcgccggccggcgtcctctctccggggtagtcagtcgcgcactgcgcatcgctgttgttccttccggttcctttcgcgtccccccttcggagcagggcaacgtccaagagatattatcgctgccgctgccccgcgcgggccgctcgctgtcccactcgtgcgccacgcctcggactcggaggtgtattccctcttctccccccgtgcttatccgcgacggaatccaatcccttcgctcaagtccttctcctaagcaaagccccctcgcttttggcgtatgcccccgctggcgcgcccatgattcccgccgattcctccgcccgttcagtccagcaacccttgctgctgcagtgctgcggctagttcggtggcggggaaggaggaggaggcgagatcttggagtggggcgaagcggagatgtcgttgccgtcgaacaaccggaggacgtgctcccggagcagctctgcgcggtccaagcacagcgcgcgggtggtggcacagacgcccgtggacgcgcagctgcacgccgagttcgagggctcccagcgccacttcgactactcctcgtcggtgggcgccgccaaccgcccgtcggcaagcaccagcaccgtctccacctacctccagaacatgcagcggggccgctacatccagcccttcggctgcctgctcgccgtccacccggacaccttcgcgctgctcgcctacagcgagaacgcgcccgagatgctcgacctcacgccacacgccgtccccaccatcgaccagcgggatgcgctcggcatcggcgtcgatgtgcgcacgctcttccgctcgcagagctccgtcgcgcttcacaaggccgccgccttcggggaggtcaacctactcaaccccatcctcgtgcacgccaggacgtcggggaagcccttctacgccatattgcaccggatcgacgtcggccttgtcatcgaccttgagccggtcaacccagccgacgtgccagtcaccgccgcgggcgcgctcaagtcgtacaagctcgctgccaaggccatctccaggctgcagtcgctgcccagcgggaacctgtcgttgctgtgcgatgtgcttgtccgtgaggtgagcgagctcacgggctatgaccgggtcatggcctacaagttccatgaggatgagcatggcgaggtcatttccgaatgcaggaggtccgatctggagccgtatcttggactgcactacccagccaccgacatcccgcaggcgtccaggttcctgtttatgaagaacaaagtgcggatgatatgtgattgctgtgccactccagtgaaggtcattcaggatgatagcctagcacaacctctcagcctctgtggttccacactcagggcttcccatggttgccatgcacagtacatggcaaacatgggttctgttgcatcacttgcgatgtcagtcactataaacgaggatgaggaggaagatggggataccgggagtgaccaacaaccgaaaggcaggaagctgtgggggcttgtcgtctgccatcatacaagcccgaggttcgtccctttcccactaaggtatgcttgtgagtttctcttgcaagtatttggcatacagctcaacaaggaggtggaattggctgctcaggcaaaggagaggcacatcctcagaacgcaaacccttctttgtgatatgctcctgcgggatgctcctgttgggatatttactcggtcacctaatgtgatggatctagtaaagtgcgatggagctgcattgtattaccagaaccagcttttggtgcttggatcaacaccctctgagtcagagataaagagcattgcaacatggctgcaggataatcatgatggttcaactgggctgagtactgacagcttagtggaagcgggttatcctggtgctgttgcacttcgtgaagttgtgtgtggcatggcggccataaagatctcttccaaagattttatcttctggttccgatcgcacacaacaaaggagatcaagtggggtggggctaagcatgaaccggttgatgcagatgacgatggcaggaggatgcatccacgatcttcattcaaggccttcttggaggtggttaaatggagaagtgttccctgggaagatgttgaaatggatgctatccattctttgcagttaatattacgtggctccctgccagatgaagatgccaacagaaacaatgtaaggtccattgtaaaagctccatctgatgatatgaagaagatacaggggctacttgaactgagaacagttacaaatgagatggtccgcttaattgagacagcaactgcccctgtcttggctgtcgacattgccggtaacataaatggatggaacaataaagctgcagaactaacaggtttacctgtaatggaagccatagggaggcccctgatagatcttgttgttactgattctatagaagtggttaagcagattttggactcagctttacaaggaattgaagagcaaaatatggaaatcaagcttaaaacattccatgaacatgaatgcaatggtccagtaatcttgaaggttaactcctgctgtagtcgggacctttcagagaaagtcattggagtttgctttgtagcacaagatttgaccaggcagaagatgattatggataagtatactaggatacaaggagactatgttgccatagtaaagaaccccactgagctcatccctcccatatttatgatcaatgatcttggttcctgcttagagtggaataaagctatgcagaagattaccggtataaagagggaagatgcgataaacaaattgttaattggggaggtcttcacgcttcatgattatggctgtagggtgaaagatcatgcaactctaacgaaacttagcatactgatgaatgcagtgatttctggtcaggatcctgagaagctcttttttggtttcttcgacacagatgggaagtatattgaatccttgctgacagtgaacaagaggacagatgctgagggtaagatcactggtgctctttgctttctgcatgtggccagtccagagcttcagcatgctctccaggtgcagaaaatgtcggaacaagctgcgacaaacagctttaaggaattaacttacattcgtcaagaattaaggaacccactcaatggtatgcaatttacttgtaacttattgaagccttctgaattgacagaggaacagcggcaacttctttcatctaatgttctctgtcaggaccagctgaaaaagattttacatgacactgatcttgaaagcattgaacagtgctatatggagatgaacacagtagagttcaaccttgagcaagctctgaatacggttctgatgcaaggcattcctttgggcaaggaaaaacagatttcaattgaacgtaattggcctgtggaagtatcatgcatgtacctttatggggacaatttaaggcttcagcagatcctagcagactatctagcatgcgcccttcaattcacacaaactgctgaaggacctatcgtgctccaggtcatgtctaagaaggaaaacattggatctggcatgcagattgctcatttggagttcaggattgtccatccagctccaggcgttccagaggccctgatacaggagatgttccagcacaacccaggggtgtccagggagggcctcggcctgtacataagccagaagctggtgaaaacgatgagcggcacggtacagtaccttcgagaagccgacacctcgtcgttcatcatcctgatggagttcccagtcgcccagctcagcagcaagcggtccaagccttcgacgagtaaattctgaccctcatgctcctggaactgcagcgagtgttcggccgtgtcgaagtctcggttgtagctagccaagtggctgctactgaaacatcggttggtcggttctggtatctagcacggcctgtgtagtgcggatagatttggttgtttggctttggagagataagctagctggctaggtgtaacgtaacgtcgaccgataactgtatgtgaatgatgatgagctgtgaggacgaataaaggcttcacttgtgttctctattgctcttcttagagtatgatggccaacagctgtacaggaaagcatccacctaaatctgggctcgctgaatgacggctaaaagttgtttggtggctttgtaatcccttacagtcgaatgttggtctttaaactgtcagttaaatgctagtacggcggtaggtctgttttctt

SEQ ID NO: 5060 - DNA, 3192 bp, Zea mays
gccggcagcgacgtcatcgtcctcggcacctcccgcggctggctcgtccgccacgacttctccttcgaggacgcccacgatctcgacctcgggagcggccgttctggcgaccactcggtgcaccgagtgttcctggatcccggcggcaagcactgcgtcgccacggtagtccaccccggcggcgcagagacgtactaccaccacgcaaggtggccgcgacccaagctcctcccccgcctccggggcctccttgtcaatgcggtcgcctggaaccgccggcccgtcgcggaagcatcaaccaaggaggttatcctgggtactgagagcggccaaatctttgagatggccgtggacgaggctgacaaaagggagaagtatgtgaagccactcttcgagctcactgagcaaagagaaggcatcaaggacctgcagatggagactgctgtggttggaaattccacaagatactatgtgatggccgtcactccgacacgactttactcttttactggcattggttcactagaaactgtttttgctagttattctgatcgggccatacactttatggagctcccaggagagatacctaatagtgaactacatttctttatcaaacaaagaagggctaaacactttggatggctttctggatctggaatctatcatggtgaactgaattttggagcacaacacagctctaccagtggagatgagaactttgtggagaacaagggtttttttgactattcaaaattgggggattccggaattaaaccaaggtcatttgcattgtctgaattccattttctgcttctgattggggacaagattaaggtagtgaacagaataagtcagcagatggtggaggaacttgtaggtgatgatacacccggaacttcaagaggaataattggcctctgtagtgatccatctacaggacttttctatgcatatgatgaaagttctatattccaggtttccacttcagacgagggttgtgacatgtggcaagtttacttggatatgaatcattatgctgctgctttatcccattgccgtaatccgctccggcggccccccccccccccagttcaggctgatgctgcatttgctgcaaaagagtattacatagcagcatccttctatgcaaagataaattacatcctgtcgtttgaggagatcagcctgaaatttatatcaataggtgagcaggatgctctcagaactttcttattgagaaggctcgataacctcaccaaagaggacaagatgcagattacgatgatctcaacttgggctactgagctgtacttagacaagattaatcgtctcctattggaggataccactgtcaccattataaattcagtagcagagcctaatagctctgaatatcgttcgatagtaaatgaattccgtgcttttcttagtgacagcaaagatgtattagatgaagcaacaacaatgaaactactggaaagttacggaagagtggatgagcttgtgtactttgccggtttgaaggagcagtatgaaattgtagttcatcattacattcagcaaggagaagcaagaaaagcattggaagtgcttcaacggcgcaatgttcctgtagaccttgtgtataaatttgctccagatttgatcatgttagatgcttatgagactgttgaatcatggatgatggcgagaaacaggttgaatccagggaaactcataccagcaatgatgcgttatgtgagcgaaccacatgcaaagaatgaaacacatgaagttatcaaatacttggaattttgtgtgaaagatttgaacaatgtggaccctggagtgcataatctgttgctatctctatatgccaagaaggaggatgaatcccagcttttgcaatttctcgacacaaaatttggtaaaggacaaacaaatggccctgacttcttttacgatccaaagtatgctctccgcctatgtcttcaagagaagagaatgcgtgcttgtgttcgtatttatagcatgatgtccatgcatgcggaagctgtggcacttgctttgaaggtggatttggaacttgcaaaggcagaagctgacaaagtagaagacgatgaagagcttaggaagaagctgtggcttaaggttgctaaacatgtcatcgagcaagagaaaggtgtcaagagagagaatataaagaaagcaatagaattcctttcggagaccaataacttgttaaagattgaggatatcttaccattcttcccagacttcgtattgattgacgatttcaaagaggaaatatgcaaatctctgaaggactacaacagccagattgagcagctcaagcaggagatggatgatgccacacgtggggcagataatatcagaagtgatattggtgccctcgctcagagatatacagtaattgaccgtgagcaggattgtggggtttgccggcgcaaaatattgactgttggagggttgcaccaggtagggagaagctatacatctgttggacacatggcccccttttatgtgtttccctgtggacatgccttccatgcaaattgcttgattggacatgtgactcgttgcagtaaccaggtgcaagctgagagaatattggaccttcagaaacggcttagcttgatggacaggaaagcagcaaaagacaatggggcaagtgttaatggcgaacctattacgagcacaaccccagttgataagctgagatcacagttggatgatgctgtagcaagcgagtgccccttctgcggtgatttgatgatcaaggagatttcacagccgttcattctcccccaagagtcggatgaaaaggcatcatgggaaatcaaacctcaaccaacgcctcaaaagattctcccgatgaccatgtctatttgatgctacggacagtacagcctaagatggatttggttttaaatttttatattgtttttgacttttgacactccttttgaccatgttttaatcctttttatgttgtggtatatggtattcaatatcctactgctgttgggttatcttgttttatatttacccaacttgtaaccctagaacaatgtagtcatcaatcgcttaccttgtggttgtggttcttgtattggatgcatcgtgttggaacatctcggtacacttgttatttgggattgtttttttttccgaagtcttgctccggaa

SEQ ID NO: 5061 - DNA, 2676 bp, Zea mays
tcgagcggccgggccgggctgcggctcgtggtatggagaatggatcacaacaagcttgtacagaaaagctttgctcgtttgtactacaatgatttcttgagaaactgcagcacggttgatgaagagtcgagggaaaagttggcaccgtatgcaggcttgtcatctgaagaaagctaccagagtcgcgaccttgaaaaggcatctcagcaagttgcaaagaacctgtacgagtccaaggttcagccaacaacattgatcccaaagcaagttgggaatatgtatacagcatcactctatgctgctcttgcatcggttatacataatagacatgaaactctggcaggccagaggattgttatgttttcgtatggcagtgggttgacatcaacaatgttctctttcaagattaatgaaggccatcaccctttcagcttgctaaacattgcaaacataatggatgtttccaagaaattgaaggcaagacatgtggtcccgccaaagaaatttatcgaggtactgaaactgatggagcaccggtatggggcgaaagatttcgtgaccagtcaagacacaagtttgctatctgtaggcacatattatctcacgcacgttgactccaagtaccgaaggttctatgacgtgaaaggtgacggtgtcaccactactgcaatgtccaacggccactgatctgtcttctgcccggagctgcaacaagtcaaataacagaggcaggtgttcctaagcattctgactcttcttagattatctattaggaagggacgctggagcttagattaatctctgccaagttgtaaggttgtaaagttagttagagctgcgtcattgctgtaatgcttgcttggtaaaagttctggcgctcttcagttcttcagtgcttgcaaaattcaaatcaagctcactactggttgtaagaattctgaataatctgcagaatcactggttacatccaagttacgctgttgaatgcatgatttcatgtttaacccgattaatgcatctggattcagctgtgttgttggagtactcgtgtcgtgtcttgtacctttttaaaaagaagtttcttacattccattgtccggatgtatgagttgactggagggagctgaactgctgaagagctgaactgggtatgagcaaatgtttcttgccctgtgagttttctccggtattcgtattctagtttcagtacgcagaaaatatcgatgtacgaatagaatttaggcattccaaaaacaaggcacgtcaattattacattgaataatgtgtaaattggtcaatcctatcaatcgtcacatgatcatgatcacaagttcacaaccgtctatgcttcatcaaacggctagaagatggcacagcacagcgcggcgtgctccattttcttcctggcggccggcccagagcctaccagtctccagagccaaaacgactgggcacaacatgtctccatccgacgacggcgaggaaaccctcgccgcgctcatagaactgtctagaacgccggagggccgggagggtctcaccgacgtgctcatcgacaccctcttcctcctcccggcctccccgccgcgcctcttgctcctccgcctacgcctcctccgcaacctcctcgccggcgatgagctcaaccactacgccttcatcgagcactccggccccgccgccgtcgccgcctccgtgctctccttcccctcgctcgcccccgacgtggcgcgcgccgcgctccaggcgctcgggaacgccgcgctcgccggggagctccaccgcgacgccgtctggcaggcgctcttccctgaggcgctgcgggtgttcgcggggctcagggaccagggagtcctggatcccctgtgcatggttctcgacacgtgctgcggcggggaaggcggtcgcgggaggctccaggagctgtgtcacgaggagctgggcctgccaatcctcgtccaagctgtcactacggcgtcacaaggtgagatgagctcagtgttgtttacttgtttaggtgtcctgttagggtaaacaaaatactgtacgtgctatggacatcgatgatttattttcagatgctaggacattataggtctgtatgtgatttgtcagttggaataatgatgcactgtactagtatcagtttgttgcatgatgagatgcatgagcctgctatcattgttggaaattggaatgcatacttttgcttttacataatggcatggcaagaaaatctatggttattttgttgcaatgtgctgtagccttcaacaatcagcactgggatttattatgctgctatagtagttcctccatgttgtattatatgaccctaaccagaatcatgcaatgcagtggagcacaaggaagagtggttagagtggcttctgttcaaagtctgtgctgaggagcagaagtttgagagcttgttctatgccttatgctctgctaatgatgtgggcgagtataatgctaagcatatttttcttctggatacgttgtcaaggtgtttgaatagccatcccgaagaagttaccgtctcagacagttttgcacatgatgtttttaatctacacaagcatgctgctgaaactgtgaattttacttaccgaggtacctcccctcttccaaccgggcaccctgcaatcgatgtccttggatatacactgcag

SEQ ID NO: 5062 - DNA, 3015 bp, Zea mays
  misc_feature (533)..(533): n is a, c, g, or t
  misc_feature (621)..(621): n is a, c, g, or t
  misc_feature (2911)..(2911): n is a, c, g, or t
cgatgataagtctaaataagatgaagggtgaaggcctagaaatgtttctctcggatcccccacataaacattgaacctcttttaggttgcaatataagtttttacgtgagaatatgctttttctgtgagataaattgattttcattagattaaacacaatatgtgttccaaagaagccataacccaaattataacaaaccctatagtaaacccaaagacaaactgcttcgtaaggaccaccataaccgtagcctattaagggcatgtacaaccagagatctttgatcggttttttagatataagggacaactaagagacaatatgatagaatctttaacccctagattataatgtagttaagatacaataagtatagaaaatagtgaagagacagacgcttcacgaagagctcatctcttaaatttttttgtttaacccttagagttttcttaaaaaaaccctcaactaatggggttgtgcatgctctaattaaactggctcttgtttcctattcctctattgccttttgacntatattcgctcttgaagagtgttgttgacaataaagttgcttgtgatgagacttctcttatccagccgagtcggaaattcaattcganccttttttttataaccatgcaaaaatgtttagtactacctccgttcacaaatatatgacattgttgattttttttaaaactttgaccacccgtcttattcgaaatatttatttaaaaatataaaataaatcataacaaaataaacgataactcaagttttttaaaaaaaaacaagtgtcaaagtaaaaaaaaaaatcaacagtgtcatatatatagtatatgcaggtggcgcgaaacagcggaacagttggggacggcaccttgacacatgtctgcgaaaaaaagtgcattttcccttgacctgaagctagtagacgttgacctggagtcctttatgaaggctgcttgctcagttgctctcactgctagttgccaagggcagcgagctgcttgcttattactgtcctattgtctgcctccacctgccggtacgaatacgaactcgcatcatgctcggtgctccaaccaaagcctctttgatcatctcctctccgcccttttcactttttactgtttgtgtatctccattctctagatatctatccttagctatagctgtatatcgaacaaattaacgtgcgagcaagaagcaacagtgttgtttcagttgctgtgtagggcagcgagctgcttgcttattactgtcctattgtctgcctccacctgccgcaagcaagggatgtggaacagcagatcacacttcgccggcgggcaggacaacgacggcaacgacgaccagccatacggatacggatacggtggcggccagcagtatgaagcaaccggcggcaagaaacgagcgtcctcgaggctgaagaagagcagcggcagcaagaaagacgacgagtacaccaagtacgcaggcaacagcaacgaggccgacgacaaccgccgcaacaggccgaacgacgacaataactacaacggcggcggcggcaaccactacagcggcgccggcgccgcaataggtgcgccctactacggtgctgctggcgccggcggctacgggagcagctctccctactacggcaacgccgctgtccacggcaccggcggcgacggcggcggcggctacgcaccgtacaacaacgctcccgccgccttctgggctccccaggacggcaccaggtcgcccatgtttatcagcactagggaggtgcacgtgtacggcgcgcctggcgggtacgacaactacgatggcagcaacaacgacgaccgccagaggaggagaggcggcggcggattcttcgggcccgcgttccatgccgtcggccgcttcttcgaccgcaagttcggcttcagcgacagggactgaagcgcacatacgccggcgttgccatgcattgcaacatgtatgctcgcgggcatctcgtcaatcgacgacagatctatctgccatctgcatgcgtgcaattacactacctagcttcttcgtccgcgtactagtgccctgctatcgttagctagagctcactgctcaccaccaggagccgtttattgcatcaaagtatttattccgagtgtgccatccagtgtcgtatttggtttccgttgtgatggagatgaaccgtatgtatacattaatacatgcatgtctatagcagaatgcaaatatgcatatgtgtggtgtgtgcttgctgctgagatttgtgtgcaagggcagcaagctagtgtgtgtgctatactattttgtttgtagacagtgtaataattatattatgtatatggtagtggtaattgtttaagatagggttgcgaaaacctttgaataatacgtacacagtgcatacacaaaaaatactcatatacatgcacgcgcagtaaactctttgaatacgtacacacactctagtactctacccttacaaacatctccaaaaaaattggctgacggatctcttctcaaagtcaaggatacttctattctataagtacaatccggatttgtgtagctatacctttctaaggtttccactaaggaaaaccatagaaatgtttcccttagtaagggaaatcagatgagtcatcatcttcttattcatttttttcatgtagttgatatgggttgatctactagcactaaatcatccttcgtgttttgatagtaattgttatgggcatgaagaatatgtggtcattacaccaaaatttatggaataaacacatggtgacatggcatggtttctcagattaaatatgccgtaagtattggatcaggactactcatctaactctatttttttttacgaatcgtagtactgacgcagacgctcatatgttatatatgtangcacactcaaccccagcgaataactttagtttgtggtgactcctccttattggcaaaaatgattagattcacgtgctcgggtgggcggtgaaatgtttaagaag

SEQ ID NO: 5063 - DNA, 1428 bp, Zea mays
tttttttttttttttttaggcggccttcgtaactcaatggatagatatatcatggtttagcccaacacacaatttgttcaagaatcaaaatactataatgagtgaagcacgttcggtaccagcacgtgcccaaccatcatactaaacacaaaaaggaaactcgactagtcgagtctaaacaagagcacctcccacagtatacactccagtgatttggaaattattagccgagactggaacacctttctgattcaaggtttggtgcgcatccactccaagaaaaaggtaccaacacaattcaccaatccagtgctgtttgaaggttggcctttacataagattcagtagggttgcaaaattcagtcagcagcctggttaagagggttgtctggggacttcttccacagtttccatatcatgtctttgtattggtgcagcgttagacctggcttttcttccttcagcttagggagctctgcctcttcaaatgccttaaaggtcgacttgaggcgacgctcaggatgcttgtcagcgggcagggacgcctgcggatccacgaccgacatccgcgcgatagcctcctcaaccgacctggcctcgatgagggaatcatccctgttagtgttttcgacgaggactacgcgctcgtactcctcctcctcggcgacccgcgcggcgcgcttcttggcggcctctgcctcccgctcgaggcggagccgctcctcctcggaggcgcacgagctcggcctcggtaaccttggggggcggagcggcaacgcgggacgccttgcgcgcggcggccttggacggcgccgatgcggaagcggcgacggcggcggcctctgcctcggcgaggcggcggttctcggccttgcgagccgcggcctcggcgcgcttctcggcgtcctcctcccggcggcgcgcagcgcgggacttggggccctcagcctcggcccagtactgctcctccttggcgcgctcctggcggtcgcggcggtcggcctccgcggcggagcggcggtcgcgggccgcctccgccttggagttgacacccatcttcttcggcatcacgggccccctcgtgcggcgactggcggcgcggcggcgtgtggctgatgtgacggccggatgggccgaagcaactgcaatccggactccgctttgcggttcggggggaatcccggccggcctcgaggtgtccttctgtaggaattggccagcggtggggtagggcacgcgttcgagagagttcttctgtacgcgtctggcccagaaatcgggtgacaccttctcacttggggctgattcggtgggaagggatagggagaaattagtttattttcccttaaattcttctaatccttctgtgatcttcttatcaccaaatcagttcttgctaaatgcaatttccacctttgacttctgcag

SEQ ID NO: 5064 - DNA, 1075 bp, Zea mays
cgagaatcagttgatatgcacgacaactttgaccaaataggtcttgcccagaagcttgagaagcatgaattgctggagatgaggaggattgctgcctacatttacaagaaggctggcacgtggaagcaatccattgctctatcaaagatagataacatgtacacaaggattgtatggagacatgctcacaatctggtgaccgtgaactgtcagaggacttgcttgtgtattttatcgagcagggtaagaaagaatgctttgcttcttgcctcttcatttgctacgacctgatccggccggatgtcgctcttgagcttgcgtggatgaacaacatgttggactttgccttcccatacctgttgcagttcatccgtgaatacactagcaaggtggatgatttagtgaaggacagaattgagtcacagaatgaagaaagagtcaaagagaaggaggagaaagatcttgtggctcagcagaacatgtatgcgcaattgcttcctcttgctttgcctgctccgccaatgcctggcatgggtggccctccacctccgatgggtgggatgggcatgcctccaatgggtggaatgggtatgccgccgatgggccctggtccgatgccagcattcgggatgccagcaatgggaagctactgagatgtttttgcagagagcttagacgacgatttgaatcgtccctgtgtaagcgaaggtggaaacttcattggagttgtagatggttacagtttggaattaatattctttatggtaccagaatttttttggcaagtgaaaccttagccagagtctgagaattgcaacctgttataccgtaggatcggataggatgagggtgattaggttggttgagcgagctgttgaaagctggtatcatttgtatagtgtgatgaaaactttgtagacattttgcttgtataatactcctacttgttggcacagtgaaggacaaacaaatgtatgctgacttgttatgtcctcctgattgcaatttgttagtatgtgttttcttgaagaagacagtaacattcgacagatactcgtgtctgtccatttttatg

SEQ ID NO: 5065 - DNA, 575 bp, Zea mays
catcccaatcgcctccccttgttgccgttgtgaatagccagctctacgccgccgaccagtcgacgaacgtggtcaagaagtaattcggctcgagcaacgcctgggacgtagtgaagccactgcccgtcagagctgactcgtccaatggctggggcctagctttcaaggcctgtggcgataggttgctggtgatcggaggccatagaggacctcgtggcgaggtaatactgctgcattcctggtgccccgaaggcggggaagactgggaggttctgtcggtgaaggaacgcgcaggcgtcttcgtttacaactgtgcaataatggggtgctgagttaccttttgctcctcggtacatgccgcagctggtttagcaaggcaacgaccatttcttgctgccatttagctaccttttatagtgacttgtaattcagaaatgacctcccctccccgaaatctcgcggcgctctcaaatgttgaatgttttgtagagagcatatatagagcattcagttaagtttacctggaactaccctctctctcttttttttctgttaaactcgttcacatttttttc

SEQ ID NO: 5066 - DNA, 1825 bp, Zea mays
aggatggaaaattttgtctaagttcttagtttaaagaaccagccattttattatatcactttgatcggtactactgcatatataaactttgcatattgagacaagctgaactattggacaattctggttctgtttaaagttatttatccttgaaactaattcagttaactgtttcactgaaacaatacaggtttatcacccaaacatcaactctaatgggagcatttgccttgatatcctcaaggagcaatggagccctgcactgaccatatcaaaggtcctcctctccatcagctcgctcctcaccgaccccaacccggacgacccccttgtccctgagatcgcccacatgtacaaaaaccagaggcagcgctacgaggaaactgcacgggcctggacccagaagtacgcaatgggctgattctgtcccactggacagtacttcccctgcaaagatcgtcacggtgttgtaagaatcaagttgcaccgttttcctgtcgtgtgatggtattaagagcccagatggctgtgtcaattgtactcgcttctcagaacaaagtctctctgtgtgtacagtgcttttgaagctggatgatctgagttctgtgctaaaaccttggtttgcacttcactttgttccctgaaatgggtttgcgaccactgaatttgcatgtgtaacctttccaagaaaccagtagcagtttgtatgttgtcaagatgttaataattcagatgggtggcctgcatccatctgaaatggagcgctatttgttaaaaccgtgcagataacagttcagtgctcttgcatatggaacatgtcgtctgcaccacgtgattgaaatggagctttccttgttgcagccactgctttttgattttgaatggcagaagttattacagaagtggcttgcagatctgctgccttgcttcaacatttgctagtctcgtggaaactgtcaggtccatcgctgttggttgaatgtggccatactttctgcaacgctgctgtttaccctctcccagctttcatctgcacaagcagtagaaagtcatagcctgccctttcttcttcgagatggacaaaagaggttgcatctgatggccaaccggccagtttggtctttctgtaccaggtcacttgtgtccttgtgcctttacttccatgtctccatgataatattcatagctgttctttttttagtgtattaccgggcgaaaattttgaagtacaggtgctttctccccctttgctataaagtcatgtgcaggtcttcatttggtatacctgtagccacacgctgggaaaaggcctgacacttgtgtacatacttgtgtaaggttgtacatgcacatgtggcagttgttatctacacactacaggagatagctgctttgccgcgtggcaaagcccaaaaaaccgctaggcaagaaaacactcggcaaactctttatttagatgagggctggcaggatgcaggacaacatagcagaacctgcacaggcaattatgcttatatggaggacaaacataaacctaaaaaaagaacgaaagaaagaactatctagcaaacatatatagtagaaaattgcaaaacaaaaacgtcagttaaacaaacaacagcagagattgctaggcagagcacgaggcatggacatctgcaggtaaactgacgaccaattgcatctgcaggacggcacctcaaagaccaagttacttgagttgtgtcgtatgcaaatcttgtgtaaataaagaatgtataagcatccatataaaagtgaattagcttaattgatatatgtctaaattactattattagaatggaa

SEQ ID NO: 5067 - DNA, 2719 bp, Zea mays
cattgggtacctcgaggccggccgggaaaacctaaaaaggactaaattaaaaaagacggacagcccagcccatctcgtcttgtctcggcgataccggctaccccgggggaccttccgtctatccaactcgcagcgtcccacgccggtgaccccgctgggcggcagaaggagacgtcgggtgccgcggagcgccgcggagcgccgccgccgtccaagctgcctccctcggctggtggactgtatcactgctcctcagacacccgctgttctgtccggcaacgtgcctccgccgcaaacccgctcgatcagcctgaggcatcgcacgatttctgactcatactttatcgccaattggctggggtggagcacatctctacccggacttgatagattccaatccttcccaactcaacgttgggcagatggcgcagatccccaatcttgacaacgcgccgctcaaccttgcggccctcagggagcagtcgcagaaggacttgttcggcatcctaaaaaatataaggggaaagaagtgcttggttatagatcccaagctcgctgggactctctcattggtcgtgcagacatcgctgctaaaggagtatggcgcggaagtgcggattctctctcccgaacccctgcagacggaatgccccaaaattgtatatcttgtgcactctcagctgaggttcatgaagttcatcgcaagtcaaatcaagaacgatgaacctaaagggctccagagggaatacttcctttactttgtacctcgccgcactgttgcttgtgagaagatcctggaggaagagaaagttcatcagaaactgacattcggagaatatcccttatatctagttccattggatgatgatgtcttgtctcttgaacttgaccattctttgcaggaatgccttattgaaggagatacaagttctatctggcatgttgctaaagcgatccataaattagagtttgcctttggagttatcccgaatgttagggccaagggtgtggcgtcaaccaaagctgcagagttgttgaatagtatgcaactagaggatccagtcaacatggatgatatggggattccagagataaacactgttattctgttagacagagaggtggacatggtaacaccaatgtgctctcagttgacgtatgaaggcttgttggatgagatgctacaaattaataatggttcagtggaagttgatgcaagcatcattggagctcaacaagatgggaaaaaggttaaggttccactgaattcaagcgataagttgtacaaggagattcgagacctcaattttgaagttgtagttcaggttttacgtcaaaaagcaacatctattcagcaagattatgcagaagtgaaatccaccaacactcagtctgtttcggagctcaaggattttgtgaggaggttgcactcgctaccggagatagctaggcatgttcatttggcacaacacttgcaatcgttcacggggaaaccctcctttcatgcccgactagacatagaacaaacaatactggaggttcagaactttgaaatatgctttgagtacattgaggagatgatacataagcaggaagttattgaaaacgtccttcgccttttggtgttactttctcttacaaatgccgggcttccaaagaagaattttgattacatgaggcgggagatacttcatagttatggctttgagcacatgcacttattatacaatctggagaaggctggccttcttaagaggcaggaatcaagaagcaattgggttggtattacaagagcactgcagcttatagttgacgtaaatgatacagcaaaccctactgatatatcctacatcttttctgggtacgcacctcttagtattcgccttgttcagcatgcagtgagatctggatggcggtctattgaagaactgttgaaactattgccaggcccacatctggatttgaaaagaggtggtttgacaattaattcatcaccggaggtacatccaggtttaggggctcaacagagtattgacagggttggtcatcgctctctggttttggttgtattcattggtggtgtcacatttgctgagattgctgcccttcgcttccttagtgcacaggaaggaatgggctacgactttcttgttgcaacaacaaaggttgtcaatggaaacacaatactcagacccattatagcaaatagcaaagaggggatgatgtaattttattccttttctgtgcatgtgttttttgtaattgcaattgcagacaaacccaagcttgtgggttttcttgtttggctgtgagttcgtgtttggtcagcaactggacgataaggctaaccacgcttgttgatagatggaatccaacagtcccattttttgttctgttctgttctgtagtacatccgctaaactgtaaatcctgggtttcatgtgttcgtctgtctttttattcaataattgcttccttgaaggccgtttatgttgtttgtggaccaatattgtgaaaaaagaaagaatgtatggaacctgttgcaaatctgcaaaaaaaaaaaaaaaaaaaaaaaaaaaaaaaaaaaaaaaaaaaaaaaacaaaaaaaaaaaaaaaaaaaaaaccctgcgcaataagaacagctctagctcccttcgtcgtggttttttcctccgcttcccggtcccccgttccccgccgcccgccgcataaaaccccg

SEQ ID NO: 5068 - DNA, 3009 bp, Zea mays
  misc_feature (2065)..(2065): n is a, c, g, or t
catatttatattgacatttatggcatgtgttctttagacatactactttctgtcactttttgttactgtaacttcggcaattttcaactgataacattttttcaattaacaacgtgaaagttgcattcgtcatcttcacactactttctagcacaagtcattggccactccactaaattacttccttttgtgtagccaaagcttttaatgtgcacttcagacttttagccattttgtattgactaatgtgttacatgtcgtattgcaatgcattagcatatgcctttactttgcgctggtattctttgtgtcatcttgctctaccctgtaacattactgcatcttttgttatcttatgtctactttgtaatgcatggtgtattcatcctttcattgtctcatttcaccatcaagaggcacccaaagtttgtttgcatgatttatttttaacattggtctaaatatgtattttgttaggtgatatttcattttacatgctgatgtttccgttatttcctatagtctttgcacactgtgctatccttattccttgtaccaaattttttgaagcaatgattagttgcagaatgcagatagttatttgttcggttcctgtgttctatctttcttttgcagctcgctataagctaataatttttcttatgcctctgcttctattccatcagatgcagcttttcatgtctgcctgatttttcttttactacgcaaaggttgatgctgtagtatacctggtagatgcatatgataaggagcgatttgctgaatcaaagaaggagctcgatgctctcctgtctgatgattctttggccaatgttccatttctcatccttggcaacaagattgatatcccatatgctgcctctgaagaggagctacggtatcacctaggccttagcaacttcacaaccgggaagggcaaggtcaaccttggcgactccaatgtccgtccacttgaggtcttcatgtgcagtgttgttcgcaagatgggctacggtgatggtttcaagtgggtctcccagtacatcaagtagggccctcgccgaggcgcatgctcagcccggcgaatttttttgccttgttcgttccggttggttcgtgacgagaacgaacgatggtcgctaggaaagtatcatggagggtatgaagaggaaaaacagtgcttaacattgttgaacatgttgagtctttagcgtcaaaacaatttatgtcgaactctattctttcgcttttccatacaacgtttactaagtacttgcgatgcattataaaattattactctttaattgtggtgtaatgttcgtgcattgcaactgagtaggagtcgttgcattatcattgcatgttcttggtttgattatgttttcttaaagcctctatctgtactataaaaagtctagttttcttttgtcaatcacgatcgttagatctattttttattagaatcatagggctgtcgtttattggcaggaacgcagaaactatcaatggaccgggtccttcggcacgacattggtcagtgcatgaccagcattatccgtgagattggatccccgcttgcacgcagcgaggcctatgtgaccgtatcatacgtaagttttctggatatatacaggtgcatataaataacattaggttgcaccggtgttcagtttttaggatgcagcctgattctcatgctggcaaccaaacaacctgtatgtgcgtatatcagtagaccgggtcctttagcatggcattggatcgctgcaaaattatgtgcatctgcctttgcggcctctcacatacatccaatgcaggcccacatgaatagaagaaaaaaaaaccaaggagggcttctatttctgtagtgtggatctgcacgggatggatgtgagaggctacaaaggtgtgcctttgcattcgggatgtacataatttttcccatgccgccactcccccacccccaacccaatcactgcacgcctccttgagacctactcgagtggagcaaggaaaggaatgacacgtatgtgccctcgccttcgttcgtctactgacgtgtanttgtaggccttgtggccataggggaaggatccgggtagcttcgtcaagcgcatgacgcacatgctcagcatctgttgcggccgccatagtttcgacctctagaagagcacctgctcctcttgcggctaccctaccgcctccctacttcctccctctctccgttcgtttgcctctgcctcactgctagatcgagacatttttagtgttaccatgttccgttgtggccgtcccagtttccatctccagaagagcatctgctctcctacgactaccctgctgcccgcatccacaagtgcatgatatgcctccttgcttcctctctctccctctctatctccgtcatttgcctcgctgctagatcgagcaagttttagtgttaccctattatgtttcgccctgattgtaatatgttgcttcgtgacatatctagatggccaaatagtgggatttagtatgttctattgtgaacttaaaactgggtgagattttgaacgttgtcacatatgcagacgtttgttgcttttaactttatgtgtgtgtatatatgcatctgtatattattatgctactgacttatatgtgatttctgctaatgtgttgttgaatttattcctgcatgaaatgatgatggaaacattgctccatgttactaattatacttgattgacaacaatgtttttcaagatgatcctagtgtgccacttgttgattttgtgctactttagaacctttgattcgtttcaagcatattatattgttttgctgttcatgccttgtatgtttgtgcatttccctcatctagagaactcgttgtatgcacttttgtagcatgttcaaccctgattttgtttactaattgatgaaaatgaaagctaccctaattttgtttatgaaggaccgatgagactattagagggggaggggtgaatgggagccacaaaatt

SEQ ID NO: 5069 - DNA, 2069 bp, Zea mays
  misc_feature (1777)..(1777): n is a, c, g, or t
tgggaccctcgaggccggccgggctcaccatgtggagagtggaccgaccatggccaccgccgccgacatccgcgtctccatcggctaccagacccgcttcgggctccgcctcgccgccgcgctctcctccccacccccatcccccgccagcaactccgccttctccccgctctccctccggcgccggcggcccccgcgtcgccttcgccgacggcgtcttcgtcgactcctcgctgaagctcaagccggccttcgaggaggtcgccgtgggaaagtacagggccgacacccagtccgtcgacttccaggaaaaggctgctgaagctgctggtcaagtgaactcatgggtagaaaaaattacttctggtctcatcaaagagatcctgcccccaggttctgttgaccacaccaccaggcttgttcttggtaatgcgctctattttaaaggagcttggactgagaagtttgatgcatctaaaacaaaagatagcgagttccaccttcttgatgggagctcagtccaagcacctttcatgtccagtacagacaaacaatatatcgtggcttacaacaacttgaaggtgcttaagcttccataccagcaaggtgcggacaagaggcagttctccatgtacattcttcttccagatgcaaaagatggcatctggagcttggctgaaaagctgagctctgaaccagagttcctggagaaccatgtcccaatgcacaaggttccagtcggacagttcaaagtccccaagttcaagatatcctttggatttgaggcatctgagttgctcaaaggtctcgggctccagcttccgtttagtgctgaagcggacctgtcggggttagttgattcaccagagggacggaacttgtctgtttcgtccgtattccacaagtcatttgtcgaagtgaacgaggaaggaacggaggccgctgccgcatctgctgcaacagttgtgctccggtcgttcacgatgcctcaggatttcgtcgcagatcaccctttcatgttcctgatccgcgaagacttgactggtgtggtgctgtttgtcggccacgtggtgaatcccctccttgctccatagtgtgttgttcagaagtgtggccttggtgcggttccatcccctcacagatgtgtggctttgacagctgatcaagctttatgtgtaatctgccatgttttgtttttgaataaatagatgcttgatcgatgtatgtaaggctgcgagatgatagttcagaattggtatgtgtggtcatggactcatggtacttactgtttccttcttcctctctgatgtttctggttctagtgacctttttccagtgacatctgtaagactgataacatatagattctgttgtgaagcacgtatcggttactgatgattatatttactgtttactttcgagttccacatcctgcttgattctgatgttcagtctttttttatataaaaataatgaattaggtttgtgccaattgtttcacaatgacacggtgttcacgatgataaggcaggcagaaatgagtagtttggtacaaatctctttgaatgaaaatacgtgaccctgaaaactgaacaatccgtttattcgttcggttatttctatacctcattggaagggattgaaaaaaaatataaaatattttgactcgatatgaattaaaacacactcaatcccttacaatccatacggaattagaaaaacctagctggaacaacgattttggcgcttcaattggccttatttctactaccgcagnatgctagaatagttcggtgaagtagccggggacaccaccgaggtgtagaataccgaaaaattgttgtgtaatcaagttttatatgcaactgccttgtaatcaaactataaaaaaatcttttaaaaaatatagatatattttattatttactctaccaatatattaaattttaagtaattacgatattttatagtggtgcacaggtaaaaggatttttttctctttttttttatttcgaatcttctattatgccatgtaaatattagagattgagttgtatacatttcgggtg

SEQ ID NO: 5070 - DNA, 2839 bp, Zea mays
cagcctcctctcctgttctcctgtctggccacgacaaccccggttcgtcttcatcgtcctcccagctcgttctgtgatctcgccggctccaatgacatgccttccataatcttccttctgacagttgtacccctgggccattcattatatattgctctcatggcaccgtggctcctgcactgcagctgcatcaccatcattcataggctgccttcctgcctgctgatctcgcacctcaaacccacacacagcagcatgtatgtatgcatccttgcctggtcgtttctcttccacccttcgtttccctgcagcatgctggctctccattactcatctcctcctcctgctgcatgtatggactttgtctgatgcttctcgatcttttgctgctgtgtttaatttgttggccggatcagcagaggttgagatagatggccagtctgtggaagaccaaggttctgcctggcctcgacaagatcttcgacaaggatggcaagaaggctgcccctgcaggcttcttcaagtccttcaacaaggtccgtatatatcacgtataacctatctatctatcttctacctgcaggagctacttcagatacgaaacctagctacaagcctgccgctcacttgatttcctcgctccgtatatgtttttgtcataatatatatagtatgagtttgttaataatcgagcctttcttatttaagctaacttgatttctatctatatacataaaaactgcaggaggagattggcaaggagattgaggagaagaaggcagaactggagcccaaggttgcggaggcttatgaagcatctcctcctgaggtcaaggtaattaattaacttatttatttatttatttttctgattgggcttgcttgctttagaagaactaagcaacgaaaactaggctgacgattgtacccgctgaatgattaattaggctctgttcaaggataagaagccagtcaagatcagcaagaagaactcgactgcagttaccaagttcctcgatgagctggctaagattggtaagcaaagtagagaaaactcttgtctcttcttctcttctctgtcgtatgtacctagctacttttccatgcatgatgtatacagttcctcaactgtttattatttgtcccacgtacgtccagacttccctggagccaaggtggtgagcgaggcggtggccaagtccggcgcctcgcccctgtctccggcgatcaccttcatcttggacaaggtcgcaccgtacatccccaaggaggagcccaaggcggaggacgcggtggctgaggccacttcccgggaagtcgccgtggaggtggaggatgccgagccggctatagctgatgcagcggccgagacaccatcggaggcgaagaagggagaggaggaaaagccggctgccgaggaggcggcgccaccggcagcggctgctactgaggagaagtaatactccgatccacagccatgcctctccctacgtagctgcagcagagtgaaaagtgattcagtcagtcagacatacacacttgcattggcacgcattattcatggacatgtacgttgctgccccgtgtgtgcgtgtgcgtgtgcgtgtgtgtgggggttctttgttttttattttggggcgattgttacaaatgtgtaattatttatatcgatatgtttgtttcattgatggaccgcatttaataagacaattctttcttgtgtatataagtatttttttccttgcttcgcggcgacgtcatttccaggcccagcacctagctatatgattatattttaggacggagagattacgtagacatgttttgacagacccatcatatacctccggatgtgagatgtagtaggtgtatgttctttttcagcattgaagataatgtatgggtacccatcaatgatcaaggatgattaatcttgctattaatcatcctgcgtgttcttcaccttccttgtgtttcttgtctttcccgtcgatagatgcgatagatgcggcatactcctttatcgctatcgatcgtactgatcaaactgcgctgctattattagttgatggagctggacatgcaagcatctagcaacttgcacttaagtggggttgctttgcttggtctgaattggattatgatctttgcgttggtggctagctcagtcaatcaaacagcctgaagatttcaggccatgtgcatggcaggtacagttgggggaaacagtccaaacaattgagatgagattttagacttgcaagcaattactaccttcgttttcaaatatttgtgacccgctaattcaattttaaactaaacctcgataaataaaaaagaacataggtagtagtacctaacccccttcttatttcctcaccagaaaaagcttcttcttgtttaacaattttttaaaagcctcaaacaggaaaaaccaaacagacaaattcaagattccgaccatgtgaatgacatatgcaaaaggggccttctagcctgcccgacacctaggtagggatgctcctaaaacatccgatttatatgacaaatctaatattttaatatagatatacataaaatttaaagctaatttttagcaatgttattaagaatattatgaagtatttaaataaaaatttaaataactttttatgtgcattattttctttctacaacaaaaaggtgaaaaaacatctgaatccgtattcgaatagacatatgaattttatatcaattattttaaaagatatagaaggaatttaagctttactttttatgaagattaatagcctcaatgctaaaaacaagaatataaatttacatagcaaattatatagtt

SEQ ID NO: 5071 - DNA, 2325 bp, Zea mays
  misc_feature (1)..(1): n is a, c, g, or t
ngatctctgatgatatgctaagtataagcaatgacagagaccaaaaggttgttaaacttggtgtgatgtctttgcttgctgtgtttaaggacgttattccaagttatcggattaggcagctgacagaaaaggagctagcagtagaagtttcgaaagaagtgaagaagacaagatattatgagtacacacttattcgctgctacaaggcctacctgcagaaattgatatcgttggagaagcagccctacttttatactgtggctgttcgttgcatgtgtgctttattagacactgccccacattttaacttccgtgaaagcctattggctagtgtggtaaaaaatttaagctcctcagatgatgtagtaaggaaaatgtgttgtgaagcaataagatcattatttataaatgaaggaaaacatcgtggtgaggcaacaatagaagcagttaggttgattgcagatcatgtgaagctcaatgattgccaacttcatcctgatagcattgaggtcttcctgtctttgagatttgatgaagatattggaaaagatgagattcaggaggaaaaggtgaaaccaaagaggaataaacgttggcaaaaaaatcaggaggttccgaagcaattgccagttaatgataagaagaaaaccagacaggaactgatctcaaaagctagaaaggaggttgatgcagaccttagagcagtttccttcactcttgacccgaaggagagaaaagggatacaaaaagaaacactttctgctctgtttgagacttacttccgcattctgaagcatagtatggccgcttcaaattcaaggactaaggtgaataatgtttcccctggtggctcacacccacttctcactccatgcctggagggtttagggaaattttcacatttaattgatttggatttcatgggtgaacttatatcttgcctcaagaagctttctgggtatagtgaccgacaagacgaaattcccaatgataatgcactgtctgtctcagaacgtctgcagtgctgcatagttgtgtttaaagtctggaggagcaaccttgaggcactgaatgtggatctgcaggatttctttgtgcagctctataacctcatactggagtatcggcctgacagggatcatggcgaggtattggctgatgcgctgaagacacttctttgggaaggcagacagcatgatatgctaagagccgctgctttcatcaaacgattagccacatttgctctctcatttggctctgcagaagcaatagcagcattggtcacactgaagcatctcctccaaaaaaacagcaagtgccgcaatatgttggaaaatgattctggtggcggttctctgtcttgcttagttgcgaaatacaaccccgaagctacggatccatatctgagtggtgcactcgcttcagtcctctgggagctcagcctcctagagaagcattatgacatctcagtttcctcgatggcttcgaatatcttgagtatggcaaacctgaatcccacccagaacccagttcctatcttgaacgtgaaccctcttgaagcgtacagagacctgtcattggaaagggaactatcaaaaccggctagcaaagcattgccactgaacctcaaaaggaagcggcgtgccaaggagtttgttgcgctaagcccagatgtgcttcagaaggcagattgctcggtggacaaagacgagctcgaagagaagctgcagagccatttctccgtgctaagaggcatatctgagaatgagaggttgagggcagagctgaaccacacactgtcatccataaacatgtacaaggagtacaagaagcagaaaaggaaaaacatgaaagttaagaccggaaggaaaaaaacagcaaggctttagccgtttaaggctttagccgtcttatctgttccggaggtctttgcgctcgaccggtggatgggtgtaattttcagttttttttgggcatatttcccattgactactatagtgcagttttctgccacccttttgccgtttctgcacaccacactatgaaagacttgtttgcatttgtgattttgggaaatggtttagggaagttatagttttttccccatttttctcagtttctctatacgattttgaggggaaagcggatagattcttccctaacgcattatacattgatattcacttttttcattctcctattttaagtcttgtcggttacataagattggagtagatttagaggattggattcctttctattcaaaatagaaaaaggaagagatttaatcctctctaatttctctaacggaataaacttttcgga

SEQ ID NO: 5072 - DNA, 3156 bp, Zea mays
cgctcgggacctcgaggccggccgggctttccggcctatctctatctatccctcctcggctcctcgccctttcccctcttgcccgagtcgctagcctccctgcccctgcccctgccccgcctcctcccgtggaccacttcctccaccttcgcttccatagcaggctagcagctgagcgaggtcaactcttccgccggcggagagagagggagggagcggggaagagacgggagggtctccgcgcacctgccatcagccaccacccgatacccaggtcttgtcgtcccgcgcagatctgctgctgcccttgagatctaaatcaaagcttccgctccggttgttgtcggttggtcggtacctgggcggcggcggcacgggaggacagcgaacatgtcgtcgagcacgatccggaaggccctgggcgcggtgaaggaccagaccagcatcagcctcgccaaggtcactagcaacatcgcgcccgatctggacgtgctcatcgtcaaggccaccagccacgacgacgagccggccgaggagcgccacatccgcgagatcctccaccttacgtccggatcccgcgcccacgttgccgctgccgtggcagggtgctcccgcaggctctcccgcacccgcgactatgtggtcgcgctcaagtcgctcatgctcgtgcaccgcctccttgtcgatggcgacccgtccttccaccgcgagctcctacatggcacacggcggggcacccgcctgctgaacctctctgattttcgggacgaggcgcactctggatcgtgggatcactctgcctttgtgcgcacctatgcgctctaccttgaccagcgcctcgagttcttcctccatgagcgcaagcaggggttaaatgctggcagcagcagcagtgctaatggcccatcaccacgggaccgtgatcgctggggttcgcctgatccctatggccgccgctctccctcctactcgtcaccccctgggtatggaggatatgatgattaccgcgagaggaatggtgggaacaatgatgacaagaggccaccgaccccggtgagggatatgaagcctgagcgtgtccttgctcgtatgcaccacctacagcagctgcttgacaggttccttgcttgccgccccactggtggtgcaaagcaaagcaggatggtgctggttgcgctgtatcagattgtgagagagagcttccagctctactctgatatctgcgaggtgctggcggtgctgctggacaggttctttgacatggagtatgcggaatgcgtgaaggcttttgaggcatatgctagtgctgcaaagcagattgatgagctctctgcattctattcatggtgtaaagatactggagttgcaaggtcatctgagtacccagaggtgcagcgtgtcactgataagttgctggagacgctagaagagttcatgagggaccgggcaaagaggcctaagagcccaccacgggagcctgaacctgagcctgttaaggaagaacctgagccggatatgaacagcatcaaagcgcttccagcaccagaagattataaggagcctgaacctgtgaaggtggaggaagaggtgaagccggagccacccccacagccacagggtgacttggtggatctcagagaagatactgttagtgcagatgagcaaggtaataggcttgctctagcactcttccagggaccgcccgctgctggtggaaacaatggttcatgggaggctttcccttcaaatggtggcaacgaggtgacttcggcatggcagaatcctgcagctgaacctgggaaggctgattgggagcttgccctcgtagagacagcaagcaacttgtccatgcagaagccagcaatgtcaggtggtatggacccgctgctgctgaatggtatgtatgaccagggtgttgtgcgtcagcacgttagtgcacaggtgaccaccgggagtgccagcagcgtcgccctgcctgctcctggacagaagactcagatgcttgctctgcccgcaccggatggttcaatgcagactgttggtggtgacccctttgcagcgtcccttgccgtcccaccaccatcctatgtgcagatggcagatttggagaagaagcaacagctcttgtcgcaggagcagattatgtggcaacagtaccagagggacggcatgcaagggcaatcgagcctgaacaagctcgaccaggcttaccacaatggtttcgcgcccaacccgggcatgccctatgggatgcccgcggcgtacaacactgggtattactaccctacttactgaggaagcctattctttattcatccttacagttgctgtgaatttttgttctgtgttgtgatcttactcccagccctggggttgtgtccagcatcagctgttgttcccctgtctctggatcaaaccttttggtctgatatatgtaatgtaattttatttgtttggaaccaaatgcggcatccgagagtagctatagtatattacataatctcaattgatctgtacactgtttctgctaaacttctgcatgttatcacttcccttcacttgatgttgcagtgcgtttgttgcgtgtcacacaccgatgttggatcgccatgtttgttggaagagcttgctggttgttggcattaagggtgtcatgtttggtggtataactatttttgttgtgacttcacttttactaaaggtgggctctgttcagacgacggctttaccattgattggatccttgaccttttacacggataagagtttttttgtccttataaaaaatataatttatttattatgatttgtgctaacatggacaacagttttatttttgtacttctatagaaaaattgtaatttgtaacatggacagcagttttatttttgtacttctatagaaaaattgtaatttatttttgtacttttatagaaaaattgtaattatttttgtacttctatagaaaaatttgtaatttgtcatactgcatcagatttgaaccgttggagatctctagcaagctttttataggcacctgaaatatagcatattccttctctgaaatagcatattcaaaattttccaaactctcctctgtctgggctcaccggacagtccggtgtgcaccggacactgcactgtgcaatgtccggt

SEQ ID NO: 5073 - DNA, 4004 bp, Zea mays
cggtccggccatcccggtcaattcggcacgaggcgctagacctcaaagactcgatcgcaccgcatcttctctctctgctcctcgttcgcttcgtcgccggcgaccccgccgccagcttccccttccgctggccgccctttgcctcgcccctgaggcgtcggtttccactgcataggagtggggcggcgatccgactggacctagggttgcgagaccccatagggtgaccctaggagcatccgcctccacgtgggtgaggcggaggagggaggatgtcgtcgctcagccgggagctggtcttcctcattctgcagttcctcgatgaggagaaattcaaagagaccgtccacaagcttgagcaggagtccggattctatttcaacatgaagtactttgaggacgaggtcgtcaatgggaattgggatgaggtggagcgctaccttggtggattcacaaaggtcgacgataaccgctactccatgaagatattctttgagatccgcaaacagaagtatctcgaggctcttgataagcatgatcggtcaaaggctgttgaaatcttggtcaaggaccttaaggtatttgcatcctttaatgaggagttgtttaaggagatcacacagcttctgaccttggagaactttagggaaaatgagcagctttctaagtatggcgatacaaaatctgcaagagcaataatgtttgttgagctgaagaagctgattgaagctaaccccttgttccgtgataagctacaatttcctagcctgaagaattctaggttgcggacacttattaaccagagcttaaactggcagcaccagctttgcaaaaatcccaggcctaatcctgacatcaagactctatttgttgatcattcatgtggacaaccaaatggtgcacgtgctccatcaccagcaaacaatccattactcggatctatgcccaaacctggaggtttccctccattgggtgcccatggaccttttcaaccttcaccaacacctgttccacctctggctgggtggatgtcaaaccctccagcagtaacacatcctgctgtgtctggtggtgccattggatttggcactcctacaaatcctgccgctttgttgaagcatcctagaacacccacaactgctaatcctggtatggattatccatcaggagattctgatcacatctccaagagaactagaccagttggcatgtctgaggaggtgaatcttccggtgaatatgctgcctgtgacttatccgcagagccataattaccaacaagatgatttccataaaactgttgcacggaccttgagccaaggatcaacaccgatgagcatggatttccatccacttcaacaaactcttcttcttgttggtaccaatgttggcgacattggattgtgggatgttggtaccaaagacagactcgttgtaaggaacttcaaagtctgggacctcagtaaatgtacaatgattctccaggcatcactggttaagcagcctccggtgtcagttaatcgcataatatggagtcctgatggaaccttgtttggtgttgcttattcaaggcatattgtacaaatttattcctataatggtggcgacgatattagacaacacttggagattgatgcacatattggtggtgtaaatgacattgcatttgctcatccaaataagcagttatgtataattacatgtggagatgataagacaattaaggtatgggaggccaccagtggagctaagcaatttacatttgaaggacatgaagctcctgtttattcagtttgtccacattacaaggaaaatattcagttcatcttctcgactgctttagatgggaagatcaaggcatggctatatgataatatgggatctagagttgactatgatgcaccaggtcattggtgcactacaatggcatatagcgcagatggttcaaggttattttcatgtgggaccagcaaggatggtgaatcacatctagtagaatggaatgaaagtgaaggagcagtgaagagaacatatcagggatttcgtaagcgatccatgggtgtcgtgcaattcgataccacacggaacaggtttttggccgctggggatgaattcatgattaagatatgggacatggacagcacgggtcttctaactaccattgatgcagatggtggcttaattgcaagtccacggatacgcttcaacaaggaaggaactcttttggctgtctctaccgttgacaatggcatcaagatcttagcaaatgctgatggacttcggttgctgcgcacgctggaaaatcgttcttttgatgcttctcgtaatgcatctgaggctgtaacaaagcctctaataaatcccttgactgctgcggcaaatgcagctgcagcaagcagttcaggagctggtgctccgtcagctgtaactgcaatgaatggggataccagaagtttggttgatgtaaaacctagaatagctgatgagtcactggacaagtcaaaggcgtggaagcttatggagataactgagtcaactcagtgcagatcaattaaactggcagacaacatgagaacgagcaagatctcgagattgatttacacaaattctggtcttgctatcttggctttaacttcaagtgctgttcatctactctggaaatggccacgcagtgatcggaattctggaaaggcaagcgcgagtgtgtctcccacactatggcaaccaccaagtggcattttgatgactaatgacacgactgacaacaatcctgaagaagctgttcactgctttgctttgtcgaagaatgattcatatgtcatgtccgcttctggaggaaaaatctctctgttcaacatgatgactttcaagacaatgacaacatttatgcctgcaccgccggcagcaacttttcttgcatttcacccccaagataacaacataattgcaattggaatggatgactcaaccatccaaatctataatgtccgaattgatgaggtcaaaagcaagctcaggggtcactctaagagaatcacgggtcttgccttttcaaatgtgctaaatgtcttagtctcttccggagctgatgctcagttatgtgtttggaacacggatggatgggaaaagcaaaagaacagatttttgcagataccgtcaggtcgccaatctaatatcttggacactcgtgttcagttccaccaagatcaaatgcactttcttgttgtgcatgaaacccagattgccatctatgaaactacaaaactagaaccagtgaagcagtggcctgttcgagagaattcacctccaatcacacatgctgcattctcgtgtgacagtcaactgatctatgcaagctttatggatgccactgttggcatatttaatgcatcgagtttgagacttcaatgtcggattcttccagcttcgtatctccccccaaatatcagtccgagtgttcatcctgttgtggttgcggcacacccttcggaagcgagtcagtttgctctagggctgactgatggtggtgtttttgtgttggaacctttggaatcagatagaaaatggggaaatcctccaccggtagaaaatgggtctgctagcaacttgtccgcaccgcctcctaatggagcttcaagttctgatcaacctgaaagatgattgagaagatggaactggtagatttttcgtggcatgagtctaaccaagatgggcttcaaaaggtggtgcaactaaccttggcagatcggttccaagggactcggacaatgggctcaataaaaacaagctcaacagcagtttatccgttgcttatatatatttctattgactgtatcgagtgaagaggatagttctagtatttcattttgctttgtttactgtgctgtgaaaaggagttcttatcagtagataagctgtagacaactatcagtttggctcctacattttatgacttagtgaaagtatcttgtttcatttgcctattggccccgatcgagggggggc

SEQ ID NO: 5074 - DNA, 1395 bp, Zea mays
cattgggtacctcgaggccggccgggggcggcccactcgctctcgctctacctccccgtcgtcacgcgctcgcctgtgcccctagcgtttcgccacctcctgctcccgcaccgcctccggctccgcctcgcctccgccgtctccccatcccgggcgcggcccctcggcctcggcgcccgcccgccccgcccccacgccgcacccctcggctacggagttggtgcagggagaaggccgagtggtggactggaccacagagccatgtcaagttccacaaattcaacagtggccacggagttgtcggtgtctgagaatagcagggaaattgagccgctaccttttgtgaatgacaaacatggaggcgtcatcattgagatgaagactccaatggatcctggagtgttttcagcttacttgaaagcagcgctggcaaaatggagggagcagggaataagaggtgtctggatcaaattacccatcaccctttccaaccttattccaacagttgtagaggaaggtttctggtaccatcatgcagaggaaacttacttgatgcttgcgtactggcttccaaatacaacacatacactaccagtaaacgcaacccaccgtgttggtgttggagcttttataatgaatgacaaaagagaggtcttggttgtacaagaaaagagtggtgtacttcgaggcctaggtgtgtggaaatttccaactggcgtagttgaaccgggggaagatattaacgttggagccataagagaagtaaaagaagagaccgggattgatgcagaatttgttgaagtgctggccttcaggcagagccacaaagctttttttgataaatcagatctatttttcgtgtgcctgctacgaccgctgtcatatgacattacgaagcaagactcggaaatagaagcatgccagtggatgccagtagaggaatttgcagcacaaccatttgtccagaaacatgagcttgtgaagtacatcctcgaagtaggcctggctaaagttgacaagaaatatgcagggttttcgccaatctccataaaatcggcgtttacagacaaattgtccttattttacatgaaccggagggacctggacaaagcctcaggatagagtaatatgtaattaaacacagggaattcaagatagttgaaatttcagttctggtatgtaaaagcaggccaagtcattcatacttgattattttgttcacaaattggaagtttcgggcatccgacacttgtgatttttcgaccatatgtcgtctgctacacatctgtgtttcaaaggagtgttgcaatccaaaagtagagataaaactgttgtgcttatggatttgtatttgtaggtctacagacaataaaacactgttttcctttattatat

SEQ ID NO: 5075 - DNA, 2026 bp, Zea mays
agacgggggcagagctggcaagtggcaaggctgcgcagccgcagagggactttttgtgtaaaatgcggtgggaaggtgcgctgcacctgcaagcagaggtgtgctctactgacagagtttgaactctcaagaggaggcgaggcagaaccgcaatcgcgaccgcgacccgcaggtgacatacatacggtgcgagcgccggaagccggaagcaccggtgacgaagccttccgtgtcatcactcatcaggatctcagggttttgtttcgtttcgcgggcgttgggaatccatccatggcgaggaagatgctcatcgacggggaggtggcggccgtcgcggatggtgggcactatgactacgatctcttcgtcatcggggcgggcagcggcggcgttcgcggctctcgcaccgccgcctccttcggagctaaggttgcgatttgtgagctcccattccaccccatcagctcagagtggctaggaggacatggtgggacttgcgtgatacgtggttgcgtacctaaaaagatactcgtgtatggtgcatcattccgtggagaatttgaggattcgaagaattttgggtgggagattaacggagatattaacttcaattggaaaacgctattggaaaataagactaaagaaattgttagattaaatggtgtgtatcagaggatccttaccagtgccggtgtgacaatgattgaaggggcaggcagtctagttgatgctcatactgttgaagttagccagcccgatggttcaaagcaaaggtataccgcgaagcacattttgatcgcgactggtagccgtgctcaacgtgtcaacatacctggaaaggatctggctattacttctgatgaggccttgagcttggaggagcttccaaagcgcgctgtaatcctgggtggcggatatattgctgttgaatttgcttctatctggagggggatgggtgctgaagtagatttgttttatcgaagagatcttcctctaagaggttttgatgatgagatgagagctattgttgcaagcaaccttgagggaaggggaatcaagttgcatccagggacaaatctctctgagttgagtaaaacggctgacggaataaaagttgtaactgataaaggagaagagctcattgcagatgttgtcctatttgcgacagggcgcacaccaaactcccagagactgaacttgcaagctgcaggcgttgagattgaccgggttggagccatcaaggttgacgaatattctcgtacttctgctcctagtgtatgggctgtgggtgatgtaacaaaccggattaatttaacacctgttgcattgatggaggcaacttgctttgctaaaactgtgtttggtggccagcaagttaagcctgatcacagagatgttccttgtgctgttttctccattccaccactatctgtagtgggcctcagcgaagaacaggccttggaggaagctaatggtgatattcttgttttcatctcatcattcaacccaatgaagaacagcatatccaagcgccaggagaagactatcatgaaactggtagttgatgctgaaactgacaaagtacttggtgcatccatgtgtggaccagacgcacctgaaattatccagggcatcgctattgcggttaaatgtggagccaccaaagcagacttcgacagcactgtcggaatccacccttccgctgctgaagagttcgtgaccatgcgcaccgtgacgaggcgcttgagcccgacatccaagccaaagacgaacttgtaagcaagaaattggtattctggggaaatgttacaccggacaaatacactggtttcatcacgttggtaatttttacgtcattggaactggaaccatgtatattgaaggaataagttgtttttttcatggcaacacaccgaaaataatgagaccgtggactttcttgatacaaataatgagctcaagcagagaacgtttatggttggttctcaaaaaaaaaaaaaaaaaaaaaaaaaaaaaaaaaaaaaaa

SEQ ID NO: 5076 - DNA, 1836 bp, Zea mays
cctcgaggccggcccggacgcgtgggggcgctcagataaaaatctcacgcagtagacaaatccacgctttccttcgcctcctctcctctatcgcagtcgcggccaaggccaacgaaccaattcctctacggcccaccttcttcctacctgccattctcccatccagcacagcagggcgtctcctcctcctccctcccgcttttatcgccgcctccatttccaggacgcgtcgaattcctccatctaccgcgccggccgccgaggcccgagggggaggaggatgctgggcgccgcgaggaggcagcttggatccggtcccatgctgggacaggttttgcgaaggctccgcccggcggcggcggctgaggtggcgaggggctactccgctgcggcgaaggagatgactgtccgtgatgcattgaactctgcactggatgaagagatgtctgctgatccttctgtttttctgatgggagaagaggttggagagtatcaaggtgcatacaagatttctaagggcttgcttgacaagtatggtcccgatagggttcttgacacacctatcacagaggctggctttactggcattggtgttggtgcagcttaccaaggtcttcggcctgttatagaatttatgacatttaatttctcgatgcaggctattgatcatatcatcaattcagctgctaagtcaaactacatgtcagccggtcagatatctgttcctattgtttttagaggaccaaatggagctgctgctggagttggtgctcaacactcacagtgttatgcagcttggtatgcacatgttccaggacttaaggttctcacaccatactcttcagaagatgcccgaggcttgcttaaagctgctattagggatcctgatcctgttattttcttggaaaatgaattgctttatggagaatctttcccagtttctgctgaagtgcttgattctagtttttgcctaccgattggcaaagctaagatagaacgtgggggtaaagatgttaccattactgcattctccaagatggttggctatgctctccaggctgcagagatactgtccaaggaaggaatcagtgctgaggtgatcaaccttcgatcgatcagaccacttgatagagctgctattaatgcatctgtcaggaaaaccaaccgattggtgactgttgaagaagggttccctcaacatgggattggtgccgagatatgcatgtctgttgtagaagaaagctttgagtaccttgatgccccagttgagaggatcgctggagctgatgtacctatgccctatgctgccaaccttgagagaatggctgttccacaggtcgatgacattgtgcgggcagcaaagcgggcctgctacagggcagtaccaatggccgcagctgcctgattggtgtacagacctttctgtttttcttcctcagttttcgctctcgggcagcaagaaacatgtagtattcataaggtgccggcaaattggccggaccccagactccaagcgagctagtttttgtagatctgctatggtgtgctttattccgttagtcgatatatgttgcattgtttctagtttcgaagtccatttatttacttctctatgatttctacacacggcctaataatcttgctaaggccctgattgaatggaaaatattttttgggagttttaggaaaatactacatttttgtgaaataccttggttttgagtaacagtaatatgaaggggatgtttggttagaagaaccaatccattctaaaaaaaaggtttatcaaaaacaccccaaccccacaaaaaaaaaaaaaaaaaaaaaaaagggggg

SEQ ID NO: 5077 - DNA, 2199 bp, Zea mays
ttgggtacctcgcggccggtcgggcgcggcccgccgggccggacgactcgtaaaaaaatagcgtcttttatcatatccgttgctcgcaaaacgcccccacacgccgccggcgaatcggcgactccccttgcgacgggaggaagcagccacgccgccgtctcggcgcctccccgacgactgcctctccggtctcgaacgcgatctggcccatggtggctctggcgccgttggttcgtgagatctagggttgtcgagcgccgcggagtgggagcggatggggcgccggaagatgtccgcagcggcgccgccgtcccggagctggtccaacgttggcgggagcgtaatccccgaactacgggcaaaacacaaaacggacttggaaaatttgacgctgacaaaacatccaatcagaacattacattttttcctgttagccatgttacaatacttgaaaagattagcaacatatatcctgagaaagagtggtttgttctttctcttaattgttttggtggtagcttccggaatcttgctctctatttcagatggcctgcataagaagcatgtgcaggagttccttaattatgctaaattcgtgttgtggtggatttcattaggtgtggcttcatcaattggactaggttctgggttgcatacatttgtgctgtatctaggtcctcatattgctctgttcactattaaagctgttcagtgtggccgaattgatttgaaaatggctccatatgataccatacagcttaaggttgggccatcatggctcgacaagaaatgttctgaatttggtccgcctgtgtatccagcatcagctcattctgttaggatccccgtctttgatttactacctcagatacagctggaagcagttctttggggcattgggactgcacttggcgagcttcccccttattttatatcacgagcagctcgcttatcaggaagcaagtcaaaagctgttaaggagcttgatgccgctacttccaaagaagatgggacagtagcatccactcttgatcgctccaagcgttggcttctttctcactctcaacatctcaacttcttctctatcttgatacttgcttcggttccgaacccactctttgatctcgctggaattatgtgtggccaatttggtgtacctttctgggagttcttttttgcaactttgattgggaaggccatcatcaagactcatattcagacgctgtttatcgtgtccttatgcaacaaccagctcctgtatcttatggaaaaggagctaatctggatattcggtcacattcctgggttttctgctaccctaccatctgtgattgccaaactccatgctgccaaggacaagtatctatcaccaccgacaccagtctcggcgtcctcacagatggaggagaaaagttggaatctctcttttacattggtttggaactctatagtgtggcttgtgcttctgaacttctccgttaagataatcacgtcgacggcacaggattatctcaaaaagcagcaggatatggagatggaacgcgtttctgattctccgcccccggaacaaaactaactagcggcgcaagtttatttcagctgctagctgcacagattctcctctgcatttttagcaactggttaagcgtctgcagacgattccaagttccaacgattatcaattagtattagtagctattcatctacacagtcaacgaaaacatgggcctggcaactggccgggtgatggctgtgacctcctatcatatcattgagcctgtagtgggcagttcctggaggagaattctactgttcttttttgtttttccggacatctacacggatagacagtagggattgtttgtgtgaagcacggttggcttatgccgagatttagcactggtagatgtttctatttgttttggaaatgctatagaaacatgtgagcattcaacaatgatacgctctgttaagtttgttgtgtattttggtttgcaactggtgcccgaaagagcaaacagtggctccatcaatttcctttggcaagtaaaaccccctatagaagacattgcttgtcctaaaaaaagtccgctgaagcatgtagggataatgtgtatttcaagtgtttgtatttatgctgttataagtgtatagtaattataaacgatgtctttaggcacaaaataattctactggggc

SEQ ID NO: 5078 - DNA, 1585 bp, Zea mays
gaaagtggaaggcggctgcctgctcccgcggtctcttccgtctcggaggtgggagagagcgatcagcggcgtcgccgggtggatccaaagcgcgcgagaaaatgcagggcggatccagcggcatcgtgtatggtggcctcaagtaccaggcgcggtgtatcgccgacatacgcgcggacgccggctcgaccaccttcctcgccggcaccctcagcctcaaggaggagaacgaggtgcacctgatccggttttcgccggcggagagcgagctggtgtgcgatggcctcttctaccaccccaacgagatttgggacctcaaatcatgccccttcgatcacagggttttctccacagtctacacgtctggtgagggctatggtgcatcagtttggaagatcccggagctcaatgggcaatcaaactcaccacaacttgagcagctctttgagcttagtgggcatacgggcaagattagacgtgtgatctggtggccacttggaaagcatgataaactaattagcattgatgaccgaaatatttttctttggaacatagacacgtcaaaaaaaatagctaaggtgatctcacagggatcaactgacatgcttccaaatttacgtggtggagcttgggatccacacaatcataatttagttgctgcaatatctgattcatcacttcagctgtgggatctacgttctatggaaaaatcaactgcaattgaacatgcacatatacgggatgtggattataaccccaagaagcaaaacattgttgcaacagcagaagaggaatttggaattcgcttgtgggatctcagaatgcttaagtatcctctaaaagatctccctgggcactcacattggacatgggctgttcggcacaatcctgcgtatgatgagctccttctgagtgctggaacagattcaactgtaaatttatggttggctaaagttagcagtgacgatcctgaatctgatagcccttctgctttatccaataggcaagaagtaccattactcaactcatatactgactatgaagacagcatctatggtattgcatggagctcccatgatccatcattattcgcttctttgtcatatgatggaagggttgtcttggaatcagtcaagccctacttgcagagaaaatgaaccttgtctagttttctaaattgtaaggtgcaaaatatggttccttgtttcctttatcttgtccttattattactgaagttacctcatgtcctaataaactgttctcttcctgctacctgtgggcttgtttgttcatattggaagctgagtagctttgccttgccattctgtagcctcttaacaagcatttatgtgatgattcggtttactgttgtagcaatggcagaaaaatggataacaagattgttacagaaatcaatttttaggatgttgtatatttgaagtgtccactgaaaaggtcttgtgttatatgatgaggtggggttgaactcaatttgtaaaaccgttcagaatttcagattagtaggattagtttttttttacttttctgtttcgcattcagaatttcgttctttgcaggtagaag

SEQ ID NO: 5079 - DNA, 2362 bp, Zea mays
tttcaattctgcgggcaatgcgttgatttctcccgcctctctgcgcggattcatgcagcatccagctgcatccagttatttggcttagcctcgtcgtttatattagagtagttcgtgggcgatgattattattacggtggctaaattcgagttatgcacatattcatcacggagaccccgagagttggtgcatgatgcactgaatcccagctgcacatgtttaaaacagcgacacagttatatcccagtaggaggtattattttctattgatcttttgagtgcagcatcgtcgcgtcagcagcggcgaagctctatactggtcagacccattaggtgtattccattcccacctacagtcggtgaatcactcgtctgcatctcatcgaagctggtgatgcaagctttgcatgcatccttagcttattaactggtgaagtggtttctttcgccctgtaactctttgggtgtaacttatggagagcgattagcaaattattaccgttttagatagttctgcgtcaagattttaaaccatttttttctgtaagttttttgctgtctctgtcaccctttgcgtgaagagagctaggtgggccgtagaaaaggcttcagttcagatctcatttcagatagcacaggaccaatctggtctgcagtgttcaactggaatataagatttcgctgcataggtcaaaggtttgtacgagtgaaaaaggtatttatttttaagttcatttagtattattttggctggctgaattgtatatttctatgttattttactatactattgaaaaaatgagtaaattgtatgttgtgataatctgaacttttacatgacagactagcagatactgtcatggctcaggatgaagctgtggctacccaaaagactggaaatacaacatctccttctaaggattacccaactccttctccatatcctgattggtcaaccatgcaggcatattatggccctggtgtcttgccaccaacatattttactcctgcaatagctccaggtcatccaccgccatatatgtggggtcctcagcctataatgccaccccctttcgggacaccatatgctgcagtatacccacatggtggagcttacccacacccccttgtgcccatgatgtcaactccaatgagcgtggagccagccaaatctgcgaatagcaaggagaaaaattccaataagaaacttaaggaaatagatcggactgcagtgtctgctggcagtggtaacagtaaaagaacagtgtcatccattgaagattacagtgcagaaggctcaagcgatgtaaacgatcagaatgtgaacgaaacgtccaggaagcggagctcagatggtggacctggcgcagaaaccaccacaggtggaaacacggaatgtgttttagctcctaaccatacgctggggaatgctaccattttgccacaacactgcttttcagctccagtaattaagcccagtgctacaaatgtcgcgaactcgagggcgataggcacggcattatctccaccacctggtgtgatggttccagttcataatgcagtaccatctgacttatcagttaaggatgagagggaattgaagcgcgaaaagaggaagcagtcaaatagggagtccgctagacgatcaaggctgagaaaacaggctgagacagaggagttggctacacaagtggagtctcttgcagcagagaacacgtcccttagatctgaaatcggccggctaacagagagctcagagaagctcagactagagaactcagctctaatggtgaagctgaaggacaccgcagaaccgtctcccagcaaagcagccgcatccccatcctctccccgtgcctcggcggagaacttcctttccatgatcgacagcgccaacgcgccgagcgtcagcaggcacacggagcacggcggtcccaggctccggcagctcctggactccagtccggcgacagacgtcgccgccgtaagctgatgatgaagccggtccggcaaatacgccacagcacatgcatgtggcctggggattccgcaggctcatgcggctcgagtgctcgccgtaaacgtcagcgttacggactcggactctgtactccagtttaggcactgattccaccgagggtaccggtaattttatctgctctcgcgccagagtgccgggctgcctgcgaccactcctgtgtacccagagttgtaacgtagtagggtgttgtgctgcatgccgaccttttgaaacttttcgagaccgtcatttggaccatttttttcgtcgcaataacacaatacagatcggagtttgtaccggaggtatgtaaaaaaaaaaaaaaaaaaaaagggcggccg

SEQ ID NO: 5080 - DNA, 3092 bp, Zea mays
gtcggagagagcgagcgagcgagcgagagtggtggtggtgtgtgcgcgagcgcaacagggagaaaaagagcgtatttcttcttcctcaccctcctcgaggaagagagagggcagctccggagccgcacgggcgcgagcgaggcaggcagtggctcctcccccctcctttcgatatcagctcatcgattcgtcctatcacacacatatcattaccgctcctcttcctcacctatgcttgtcctctaactcattggcagaagagaaaaaaaaagtccttgttgagttgttgtatcgggttctggtggtgactgttactggggtttccttgcccggttcttgatttgcgcaaggacagatttgccgtcctctcgggttccgccgtgcggtgctgaatcctccttccctgttcccttcccttaggtttggatcggggatagggatggaagtggacagaaagaagaatttgcagattggatccaaggggaaggaggttcagagcaagaatccgaggcgggaggagccgctggcatcgtcggaggtggacatggatgagccagacgctcctgagagcggtgacatgattgttgatggcaacaatggcagctccagagagagccccttgcagcccatggattccaagaattccaagggctgtgcggtcaagaagccaacatcggtgagctcagacttcggtgaggagctggacttggaccttggtggggagaagagtgggacgcagcaggagaggaagctctcaaggcaagaccgggttgagctttgccggtcgttccagcttgcagtgagctcccatgattgggagagcgccgaggggctggtaggaatggctgatgcacaagggctcaacgatgtgctgtgtgtggcagtggatgcgatttggttcttgagtgatagggatgagctgcttgctattgtggggttgatcaaaagggttgtgtctgagggcgcaaaagattttacccgtgctgcgctccggacatcattcctcgcatcgtgtgtatcagcatgtagggggcggtcgactagccttgctgatgcagtgagcttcatgggccagaaattgcatgaacgacttcaagaatcccaaggtgatgaggtattgaaagcagaagcaagtgcaaaggtgcacaggtttacagaatgggctctaaagtgtatcgggctgcattcacgtgttcgagagaacaggggcaaaggaaaccacgacactgtaattgaggttcagcttcagttgtctgctttcaagatatttcttgatcttgctgataatgagcttaccgggaaggattttacggaggcttttgatgctgcatgcttccctcttacactcttttcaaccaccttcgaccaaggatgggcatcaggaatatcagcagctgcagtacaaggccttttagagttgttggtagagggtggtgcagacaatgtgaaccaatgctttcttgaagctgcacgctatggcagcactgagctcgtgcggatcttacttcaggttgctcaaagaaacagcttggacattgatgtggacctagcccttggctttgccgcacactatgggaagatcgaaaccatgggatgcttggttgaagaaggtaatgctattggctttcttggccctttgatgcgtgctgctgaacgtgggtgcctccaagttgtggaatggtttgtcaaccacgggtgtcgagaaatggagctttgcctagcccttactgctgccacctctaatagccagattgcagttgctgcttatcttcttcctcttgtcccgcaacatgttcttgcccccctcagcattgagattatcaaggctgctggtgagaggactacgggttccctgcagggtgtggattttcttctccgctcggatttcctcaatgacccagctgccacatatgccgtggcagacagtattgcaagatgcaccgatgaagctgtggacgcaaagcttaggtctttcatgaatgagcactggagcgaggcagctttttgtgcgggattcgaatctgcacagcagcactttgttaatttcatgaggataatggaaaggggtgaatcaccaatccgcttaggggacctcccacttgagctggtgattgccatggcctacctgccgctctataaggaatgcatgaattccaatgggcgacttttgcctcaaaggcttagaggtcagcttgtggaggctgcaagcaggctcgaggaccggcaagtggaaagggatagccaaagcagagaactcttggccatcttggagcaccacataccacgattcatgatccaaacttgaaggtaagcgcaggcatccactctgaaccactgctgtcaatgcaagcaaaaaacaacttacaagggcaatccacgccgtcttcagtgccgccaccatgttcctgcttggggggacatcaccaaatgatagcatcttgagttggctctcctgcaggcgatcttcggagagtatataattctggggaatggtgtgtgccttgtcgaggcatgtgtcggagtgttttactgggaccgtaatcttccatgaaaaaaatgatataagccttcggtatgtaatcctgagttttcggtgtaattcaaaacgctggtcttgtgacaacatgtcgctagttttggctagcgacttttttgatcatggcttcaaaaacaaaacgaagggagtatattcatactgtgtggagattgccttgatcgtgagatgtgacatggttctgatgaggtacaagtttgagcaactctgatagcttcaaaaaaaaaaaaaaaagcatcctacttgtcagaatgtggtttacttcattgcgtttaaacaaggagaattagacatcgcgcaacatagaaaatgcaggtcatgcctctcgaggaagatagcaccgttgatggctttcatctacaaaatactatccctcggtacaaaatactctctctctctctttatcttggcaagaacaaagttgacgtttttttagaagtcaaacgattttaagttcataaaatatatatagtaaagtactaacatttatgataccaactaattataattaaattaattattaatatattttaatagt

SEQ ID NO: 5081 - DNA, 1562 bp, Zea mays
tgttgacatgaccatttttacgtacataatgttagacttcgattatccactacctgagacactgcttgagttaggatctcgcccacgcgtcccgccggttgttgatcccaccaatagagccgtgtactataatgatagatctcctccggctgaattgaagcgagacatgccggtgggaactgaagctgccagctaccgcctccccgtttcagctccggacgctgctgcggcagctgcagccaccgccgcgacacaggcccctcctggatatgtgcttgcccagatgcatgcgcctccgccaccgcagcaacctccaccacagcagcaaccacaacagccagctcctcagcagattgttgctgctgggaatcaacatttcatccacaaccctgccactggcacctttattccaatccaatcctattaccaccatcctgtccatcagcaggcaccccagaccatgcaaaggcagcaacaggcacctacgttcgacccaaatacagggatgtattatgttcctatgcagcagaacgcacatcaggcatatggcgtgcctcctggtgcacaagtcactttgccacctccgacccttgttgacacaacgccaaagccaaccgtgccaattcctcagatggcagtaaggcctgaattgcaacaacctggtgtctaccgaacaacagctgcggctacccctgctccagcgcctaatgcagcacctggatatgctgggatggcctaccaccatgtcatccaatcccaccaccaccaccaccctgcgccgcagcctgtagcaaacatggctggcaactacgggtatgagtttgctgatcctacgcgcccgcaagtctactactcacaggcagctgcacctccaacattgccacagtatccgcccattgtctctcctgatgctggccaggctgaaaaacattaagcagactgaggattggtgaattcaggtatgcctcaaattctagaggccttgttatccgtctgttacttatcattatcgttgctaccgcatgttacatgaatccgcggcaaagagtgaagatgttgctattaggcaactgtgcatttgcattgggatcaaaacaagcatgcatcatccaaggataggttcaacataaggtttttattggatggttcttgtgttggtgagacagaagggtgccggattagtttgggggagtgaagtgttggatccctgttccaaattggtcttttttttttccctttcttcttattttgaataaaatatagtgtccaaaagaacctggtggaaacgaagaactcatcatcatcatcatcattttgtgtagccctctgtatatttgatctcatggatgtcattcaggttgaggtgcagataagtgtgttattagcttgcttgtagaaaccttatgcgagttaaatatatatatacatcggtcccgtattgtactttgatattgatgttggtatgtttctttttgttgaatacattgacttcgatttttcttgctgctttagtcgttctggttccgtctacctcccaaatttcatcgcagcacacatagcat

SEQ ID NO: 5082 - DNA, 1940 bp, Zea mays
attttatttctcaaaagtaaaaggatctaaacagccttaaaaatgatttcagaagatgccgaattcaatgaagtccgacagaaggctaaattaagaaatctgatgaaccatggagaagataacatcaagtccgcgactactgtagtctgtaggcactaggccgtccattctgcccagtgcgcacgacggccaggatcttcaaacggcacgagcacggcagcggccgtcgctggccactcaccgcgcgccacgtacaccacaaaggggcatataaagatgccaacccaaagtagcgtgagtgcgtgacgcaccagctgcttcccccctatatatatctatataaaaaaagaaagaaaaaaaaccggacaaacgtgtggcgtcggcagccgggcaggtaggaaaaggtatcagcgtcgccaatctccatggagctcacaggcgccgcgctccggcgatacgcgctgccgtcggcgtccccggtggccgcgagggtggggaggaggaggcgaccagccagggtggcctgcgtcgggggcggggggttcgcggaggaggggcacctcaggtactacgaggcggccccgcggaggaaggcggtggaggcggtggcgagggacctgggaaagctccgggccatggggctcgtcgcgggggacgcagccaaggagaaggtcctctcggaagccacggatcttctgctgcaggagctgagccagatgaaggatgcggaatacaagataaacaagatggagaaagaacagaatgctgctatgaaagcactgaagaagcaggagaggcgcaccaagaagactgccatcatgatgatgaagtgtgaagaagatgagtcatctgagtcgagcgagagcgattgtgaggacgaggcaaccatgaatgccgagcaggacatggtgatgtcaacagcggttcccgaggttgttgcatcaagcatctcagctgtcctcgcgatggagtgtgataaggctgcagtgaaggccatgaagaaaatggagaaggaacaaatgaaggccatgaagaagatggagaaggaacagaagaaggctgcgaagaaggccatgaagatggagaaggaagcaaagaagatggcaatggctacactgaatggctgcagggatgaagacgattcctcatgctcatcagagtcgagtgaaagtgaatgcgagggccaagttatgaggatgagccgctgcgctacaatcaccgcaccggaaatgccacctccaagcacgggtcttccaatcatagttcctcaaattccagcacctttggcaccacagccgtctcaatctcaaccttcagagccagcaaccgcagtgcaagccaccagagtcagcagcgttgcagtaactgagacatccacaaccagcagaattgaggtctgcatggggggcaaatgcaagaagtcaggcgcgcttgctctcctgcaggagttcgagaaggctgtgggcaccggtggcgcggtcgtcggctgcaagtgcctggggaagtgcggcctaggtcccaacgtgaggctgaggagcggtgcctctgcggaaggttctgcaaaggggaacccactctgcatcggtgtaggctttgaagatgttgacaccatcgtggctggtctctttggaggcgctgatctgggcatgacacccacctagacctggtggtactacctcgacctagtcgtacttcaagaaatcaagagcacaacttgtaatcacagatgttgcattgaacaaatgtatagtgcagctacggccttgctagtgctactgctaagtttatgtactctatgtctatatagaacacgtatggtaatcttgtttctggtatgtgatccatattggtcagtgattgttttcatggttttcagatttgagcatctgtggcaatgtagggatggttaatgctaaaaaaaaaaaaaaaaaaaaaaaaaa

SEQ ID NO: 5083 - DNA, 2201 bp, Zea mays
cattgggtacctcgaggccggccgggaccgcacgtccgcacgccgctcttcttcccctgcttgctctgggttcctccattcctctccagtctccatcacaggagcacgcgacgcgcgccacaggaaggaagggaaaaaacatggcggcggcgaacggggacgcgtgccgcagcgtcggcggggtgccgcgcccgacgaaccccatggtgacgccgctgctcaccgacctgtaccagttcaccatggcctacgcctactggaaggccggcaagcacctcgaccgcgcagtctttgatctctacttccggaaaaatccatttggcggggagttcaccatcttcggtggcctcgaggaatgtataaggttcattgctaacttcaagttcacggaggaggaaatcaaatttcttcgatctgtcatgcctgcatgtgaggatgacttctttgagtacctccgttcgattgactgctcagacgtggaggtttatgccataccagagggttatgctgtgttccctaaagttccactgatgagaattgaaggacctgttgctgttgtccagcttcttgaaactccatttctaagtcttgtcaactatgcttctctggttaccacgaatgcggcacggcaccgacttgtagctgggaagtcaaagaatttacttgaatttggacttcgacgggctcaagggcctgatggaggaatcagtgcatcaagatattgttatatgggaggctttgatgcaacaagcaatgttgcagcaggaagattgtttgggataccaatacgtgggactcattcacatgcatttgtgagctccttcatgggtcttgatgaaattactgacaaaacacttactagttctgatggttcaaacacatgtgaagattttatctctctggtgcagaactggctgatcaggattcaggattctagttcattgcatggcacctttggagaaacgagccaaagtgagttggctgcattcacgtcatatgcactggcatttccaaattccttcctggccttggttgacacatatgatgtcatgagaagcggagtgccaaacttctgtgctgttgctttggccctcaatgatatggggtataaggcagtcggaattaggttggactctggtgatttagcatacctatccgttgaggcccgcaagttcttccatgcagttgaaaaagaatttgtagttgttggctttgggaaaacaagtatcacagcaagcaatgatcttaatgaagaaactatagatgctctgaacaagcagggccatgaggtagatgcatttggtattggcacctacctagttacatgctatgcacaagctgcacttggttgtgtattcaaattagttgagattaacaaacagcctcgtattaaactttctgaagatgtcatgaaggtatcgataccatgtaagaaaaaatgctacagattgtatggcaaagaagggtatccgttggttgatataatgaccggagaagatgagccaggtccaaagattggtgaaaggctcctatgtcgtcaccctttcaatgaatcaaagagagcgtacgttgttccacagcatgttgaggaattattgaagtgctactggcctggaaattcatcgaattcacgggaggagcttccatccatccatgagattaggactcggtgtattcaccatctggaccgaatgaggccagaccatatgaggcggctgaacccgacgccttacaaggtaagcgtgagtgctaagctgtatgacttcatccatttcttgtggctcaacgaagcgcctgtcggagaactgcaatgatgaaatgaagtggcggtagggtcggatcccaaacctaactctaataagctgatccgcttatgggtgccgtcggagcaaataacaaactgttgccgccggtgcaatttctgcagtagttttaccatcgcctgcgctctagtaaaatgtgagtatgtgctggtgcatctgtcaaaacagaccatagctgaagtgttacgtactgggaacaagaggatacccataccgagttagatctatatgactgaactaattgcaatgaggagcaatcactaaatttgagacaaatttacttgtcttgtcaattaccctaccattctcctctgcggcattttatgctttttactgaaccccagttagactgttaaaaaaaaaaaaaaaaaagcggcc

SEQ ID NO: 5084 - DNA, 2769 bp, Zea mays
ccgggccgcaagcaagcagcgactcccgccgcgcacggcaccttcccctcccccgcacggccgcacacaccagacaccaccaccactcgcaagtctcttcgccgtctcgccgagttattagaaggcggggaaaaaaatcaactcgaacgggcgggtggcaaccaaccaccaagcggcgagggcgatggcggcgtccccgccgcggaagcggctccctgctgcgcgcctcatcttcgccctccttctcctgatgtcctccgtgctgccgagggacgccggggcggtggaactggggctgaagctgcccttcagtccgggggacgtgctccccgtcctgccgcggcaggtggcgtggcccgtcatgaacacgctccacagcgccgtcgacctactgccgtccttcgtcgccgccgtggcgcccgggtcgccggcgccggcggcctggaaaggcgcgtgcttctcggagaacgaggccgctatcgagctcacgcccggggaccgcaacgggaccgacgtcggcggtgccgtactgcgcctcaagactgcttcagctcatagttgggcgtgcatggatctctacgtttttgcaacaccatataggataacatgggactattattttgctgctcgggagcacactttggagattaaatcatgggaggaagaagcggaattgaaatatgtgaaggagcatggcatttctatttttctcatgccatctggaatgctcggaactttgctatctttgattgatgtcctgcctttgttttcaaacactgcctggggccaacattccaacctagcctttttagagaagcatatgggagcctcatttgagaaacgaacccaaccttgggttgctaacattagaaaggaggatatacaatctggtgactttttggctttatcaaagattcgaggacgatggggtgggtttgagacattagagaaatgggtgactggtgcatttgctgggcatacctcggtttgcttaaaagacgagaagggtgatctttgggttgcagagtcaggctatgaaaacgagaagggagaagaaatcattgctatagttccttgggatgaatggtgggccatggctctcaaggatgaatcaaatcctcagatagccctgcttcctttgcaccctgatgtgcgtgccagattcaacgaaagtgctgcatgggaatatgcccggagcatggttggaaatccttatggctaccataacatgatatttagctggatcgatacaattggagataattatccacctcctcttgatgctaacctggtaatggcagttatgtcaatgtggactagattgcagccagtttatgctgcaaacatgtggaatgaagctctaaacaaacgacttggcactgaggatttggaccttcaggggatcattatggagattgaaagacgtggaatgtcttttgatcagttgctcaccatacccgagcaagacgaatgggtgtacagtgatggtaaatcaactacttgtgtcgccttcattcttgcaatgtacaaggaggctggaatattcacccctttctcggagtcgatccaggtcaccgagttcactattcgtgacgcatacatgctcaagatatttgaagacaacccggcaaggcttccaggttggtgcaacgcagacacggacaagcttcccttttgccagattctcggagagtacagaatggagctaccagagtacaacacgattgaaccttatgcgaaaatgaacgagaactgtccgtccttgcccccaacgtacaaacgacccgcacgctgctgactacgagattgtctactatgtatctttctgcagctgcttcgtttacacagtggcagtagagtgttgttgctatgttctgtaaataaaagacactatatatataggtgcttggtagatggtagttcttaccagtaatgtagctgcgatgtattcaggttcacggttttcagtcgatcagttctgaagccacggcgtcggcgaccaatatgaaggttaggatttgtcagctccggaaagttgcttatatgtatcaatgtatgtatgtaggcaacattatggcttggtcataaattgtgaactccgtcaagaaataaatctataatgcaacgtcaggtgattctgataaaaaaaaaaaaaaaagacgaaaacataacaaagattactccatctgtcccaaatctatctattattatagagtagctgtagattcctaaaaacctaattttagctataagctgtggcagctgttgcacggtgacggttgtagctaaaatatatttagttaaaataactgtcaattatagattctgtaagagcatgatagcttaataaattgatagcagaaatctgaaaaatttaggtagaagaaaatttttaattgaactatagaaatatatatatatttagaaatttattctctatttgtttggtagagattcaaatttctggcggtgaatctagtttagatagctgaaccaagcacaccatatgatatggatattaatcaaaaaagagaaaatatgtatagttgaattttaggaagatctaactgtctagcttaaacaatatacctgtaccacatacaatataatagtttggagcccaagaaaatggtatgctcatcctattatagctcagcaggtgcaggtttgattctttttggaaggtgaattttaaaataaggaaagagtccggctactaggccgtttttatttgcattggccaaacaaaggaaacactgcaggcatgca

SEQ ID NO: 5085 - DNA, 2448 bp, Zea mays
ttttttttttttttttttgctaacttccgtgaaattaaaatgctcacgaacgaatttgtgatttagaatttagaatacaagtgccacgttatttcatcagagagctcctaccctaagtttatctggacgccattcagaactacacgtacatattgtacctatacacgtcggatctctcaataaggatcctccaacttcacttcaaattcagcatccccagtagcttccaacatgtccagtattttcttcgggccaagagttgtgattgattggccctcagcataaccaaccattagaagtttccctatcttcgacctccaatcagaaacagatttctcagtccacctgtcatggaccacacgatcacggtagttgaccattgtgccaagcccagtgtttcttagccagccatatccttccaaaacatgtgcctcgccttctgttaaatctgtaccaaccagtaacggcctgttttcaataagagctgtccttccacagccactaagcttcattgcaacaaccagcctacggatctgccattctattggccttgattggaccacctcaaagaagtatgttgcataaccatattcaggacgctcaagaactatcctattatggcttctaaatataaaaataaaggattgcagatccctgcaccatccccattccacaggacagtcacggaatcgaaggtatcgtgactgctcaataagagaaattaaacaggataagcagtaaatagacttttcccccctttcgtatctagctgctgacagtaaatgacattttcccctcttcggaaatatatttgcaatcacgttttcaagatcttcaaagttactttctgtagaatctgcaatcatttcattatcttcttcagcaccgtaaagtttgatttcttcaactcctattcctctgtccaaaagaatctttagaagccctggagcatcttcatcaagtgccttttcaattgaatccgtggctgttttcttcctctttcgacgagaacggtatgcaacaccctcatcaacagtgtaagcatcttctttaagtgttttttcagttgaataacttgttttcctttttctgcgttgtcgggaactgaaagaaacattctcacataagccaggtaactcacagtcagttagttcatcttttattcctaaagatagtactgagccttcggcatgagtagaattttcttgaggtaattcggaaggaccaatctcataacctcctaatgcaggttccagttttacatcagccagatgagccccttgttttcttgcaaccagctcactgttttcacccatacaagttgcagtgccacctatctggttttcggaaccctccactggaagatcttcaccaagtattctcctgttgctgtcatcatccatgggattactctataatagaaggtgcagaagaaatttcctgcaacatgctgaatatatcttctttgcttatttttccctcatgatttcttttgggagatgctctgctagtttccacatgcattatagatttcccagctgatactgtagtaagccccagacttttgtctgctagaaggatcctgtagcgctctttcagagatatatgatcaagctcatcggtttcagtacagatttcaggattaaagccttggccccattccacgcttgaatctttatgtgtggaaacatcccattcggattcaatatgagttccctcggccaattcacacagcctgttccgtgatgcaaggaatatttttgacgccactatctctgactctgccttcactgtgttttgtaaatgatactgatgtaatctccaatcagtttcctgagatcttttatcactcggcatgtctgcatacagggcaaacacttccttgcaacccgtcagtgttccatccaggatgatggatctagggcttccaattttcctccagcagttatttacatcattctcactgcgcccgcgcgcaaaacttctatggaagaagtatgatgcacgaccatcttgcctaacacctggtatatgttgaggatgagtgcaaataaattctctaacatcatcaacaaatttaatgaactcgttgataaatggatggcgctcagctagagcgttcccaacttctgctgctagatgccacagaagatcactatcactgggattaaattctacaccccttggtagacctggccaactctcagaatacatcaatatggtaggatcaggagcggacccagcaaaggacatgagcatacagatgtacacccaataactggtgggtgctcgtcgccagtgaaggccccaacgaagacctggcgaagggactgacgttgctagacctgggcaccagagaaccaggagtacggcggcggcggtcgtcggccagttgcgccaggagtgagagagggcgcgcgcacgaacgcggcccggccggcctcgagg

SEQ ID NO: 5086 - DNA, 2912 bp, Zea mays
gggtcgcccagctccgctaatgtcctcaacagtgcgggggggggctgcagacttttgaggggggcgtgaaacgatggagaaagacttggagaacctatgagtgatctatttgcgtgttttgtgctagaccctctcgcaaccgcatcaatagcacaagttcatcgtgcaactctggcagaggggggagaggggttgtcaaaattcagcatgatggggtgaaggagatcatattagaggagctgaagaatgcaaaatcattgattgaatggatagcgtgggcagagcctcagtatgattttaatccgatgattgatgaatggggcaaggaggctccaaaggagcttgagttggaccatgaagcagagaatactagggctgtgtccaggaatcttagtcgcaaaagtgactgtgggagtggcagtgtttccagtactgtggatgtactcattccagaagttattcagtcaactggcaaggtgctaattttggaatatatgggtgggattcgtttaaatgataatgattcattgggaagcgtatggtgttgacaagcaaaaactgggcgaagagataacccgtgcgtacgctcatcaaatatacattgatggcttctttaacggcgaccctcatcctggcaattttcttgtgagcaaggaacctccacataaaccgattctccttgattttgggctcactaagcgcatatctgaatctatgaggcaggcactagcaaaaatgtttttgtcatgtgcagagggtcactagtcccccccccccccccccttttcagagatggggcttaaactgcgggttgacatgcctcagcaggctatggatattgccacagtattctttcgtcagtcaaccacagcaagtgaagcaaaggagaacataaaaacacttaatgaccaaagagagagaaatgtcaaagctcttcaagaaaagatgaaattgaacaagaaggaggttcaacgctttaatcctgttgatgctttccccggggatgccataatatttatgagggtcttgaatctcctcagaggtctttcagcttcactaaatgttaggatagtttatctggacatcatgaggccatctgctgaatcaactttgttagggagtttgacacacggacaaatacctaacagtcagtggatttttgactcacctgctaactctgatgtggagtctaaactgagaaattatctgcttgagttgggaagcgacaaaattttaggaatacaagtctgcgcatataaagatggaaaggtcataatagatactgctgctggtatgctggggaagtatatccccgacctgttcaacctgattctctttttcctgttttctcagtgactaagggtatcactgctgggatggtacattggcttgtggacaaagggaagctgaagtacgaggaaacagttgccaacatatggccgaattttggaactaacggaaaggagttaataaaggtccatcatcttctaaatcacacatccggtttgcacaatgcactgggtgatgtggtaaagaatgatcctttgttggtatgtgactgggaggagacactaaaccagattacgaagagtacacctgagaccgaacctggttcagcacaaatttaccattacctctccttcggttggctgtgtgggggagtcatagagcatgcatctgggaagaagtttcaagagattctagaagaggctattgttcgtcctcttcacattgagggggagttgtatgttggcattccaccaggtgtcgagtctcggctggcagcgctgacagttgacaccgaggagctccagaagctatcaggaatcagggcaggtgcagatgtgccagcagctctgctgaacaacatcgcgcagatggcgtccggtgtgcccgctattttcaacacgctaaacgtccgtcgggccatcatccctgccgccaacggccactgctctgcccgcgcgctcgctcgatactacgcggcgctagcggccggcggttctgttcccccgccgcactcttcgggcgccatgccgcccctcggcagccacgtgcacacccccaagttcccgaccgcgccgctcaagaagaagaagaagggcgccggaaagaagaagggcgccggcggcggctccatgggagacctcaaggtccaggatataagcggcggcagcagcgacaggaacgggtactgccagctgcgcaccagcgacgccgacagcgaggcggggagcggcagcggcggaggcggcaggatgttcggcagcgacaggatcctcgacgcgttcatgggcgtcggcgagtacgagggcatggcgcaccgggacggcaagttcgggctcgggttcaggaggtacgacgacgccggcagcggcagcggcaggctgaggtgctttgggcactccgggatgggcggctcgaccgggttctgcgacgtggagaacggcttcgccatcgcggtgacggtgaacaagctgtctctgggcagcgtcacgcgcggcgtcgtccggctcgtcctcgaggaactgggcctgcccgtgccggacgagtactcggccaccggggagaaggggcctgacatgatgctcaacctgacgacaacgacgacgactacgccgccgcaactgagatgacgacggcgaaactgagattaccaggttgggttcgtaataatctgtggaacaagatatatagcgagcagaaggaaggtggggtacagggatttggtggacagtatatatacgcgtgccattttgattttgacgtggcatgtaaaactcggcaaattctggtatattacgaagcaagctgggtgctgggaattgtggccagcagtacaagaaatggacatgctagtttgttgaccaaaaaaaaaaaaaaaaaaaactcgagggggggcccggtaccca

SEQ ID NO: 5087 - DNA, 3093 bp, Zea mays
tttttgttttgtttcatccagcaacacaaaggtgctgtatctactagttgcatctcgcacatgcccaggaattttccaacagcgtcttctaatattggatagtattaacaacgcataaagttacatgcttatcagccaaccttaccttacttcccaacgtccgaaatgaccaaggatgaacagaaatctgcaaggaagggggactaaagactactcttgcgcttacgtggtactgatatatcattgggactaccactacagctacaactaaaagagctcgaactcgatgtcgtcgccattcagccggaattccagacatttgccttcctttttcttgcgtgttcccgcgagtgttgctgcagtatcaatatttttcggggtctctggtggtgaagtccaccggatcaaggcccagttcagaccttcgaagaagggatgccgcttaatctcagcagctcctctcgacgagccaagccggtactccggttctttcacaagcagccctctgatcagatctcgagcgtggaagcttaatgctggactgtcagggaacttcaagccctgtgagatcacatttgagagtgtttcgtcattgtccggtcccctgaatggtgtcttgccatagagtaattcgtaaaggaagattccaagagtccaccaatcaaccgagctgccatggccatctcctcgaatgatctctggggcaagatattcatgggtcccaacaaacgaatttgaccttgcttccgtaggctcaacaacgagctgtggaagtgatggtttcttcaggggttcagctctagtcctccgtgtccttgacggtgtagatgaaaccagactgggcgtgaagcaagacgaattgctccacgatggctggatacacaggggatcaatgcagctttgtgcacagggaccagaaggcctacttggctcatctctgtctactgatgatgttctcacaagcattgggctcactgagcacctcagcgacagatcaaagtctgagagcatgatgtgcccatcttcacgaacaaggatgttctctggcttcagatcacggtatatgacccccaacatatggagatactccaaggctaagaggacttcagcgacataaaaccttgcagctgcttccgaaaaggttttggtaggttgcttctgcctaagaacatgtaggtcaccaccagggcaaaactccattaccagacaagaaaggttgtccgtcgtgaaatgagaatacagggttggaaggaatgggtggtcgagcatttgcagtatctccctctcagtttgtgctctgagcattttctttctgcttatgaggtactcgatgtccataaccttcaatgcgaacatgcagtctgagcccactaactcagccaaataaacagtgccaatatccccacaaccaagttgtttgagaagcttgaagttctttaatcccaagctcccttgttggatagccatgcgcctgatggctccccatctcacatcctttgacatgtgaggcctgcttctgttagcactgaagctgccataactgtcctcactgatgcttgtgctggtgctataatcaccaatgctactcttagagctttgggagcattctcccttctcctttgatcttaacaactcaccaaccttcgagccatggatcacaccgacaccacagcctttggtgccaaaatcagctccatcaacagtggtggagctgacagtagccttcttgtcagttggcgctggggttctgggttcatcctgaagggactcctgatgtttactagtgtgagatttaggacctttcgtctcacaatgcttgtgtgatgcaggcactatagcaggttcgggtttcaccttctttttcgtcgaggttttattccgaaacattggcctcaccaaccgtgagccacctactggaacagcccgggggctagatgttttcattgatttaccttttctctgctttggcagagttacttctacagaaataccttcaactccctctgatgacttgttactgatcacatcttggattctggttttatgaacattccctgtggtaggagatgctgatctcaaattcttcttggctgagctcttgctctgccccttactgatttcacttggcttacccactgaacttcctgccgatttctcaggcttcacagaaactttccctgccttactcttgtcatcttgctcctcattggtttgaactgcaacagagccatgtagcttcttgattgctccagaatcagaaggggtggacacccctgtcggttttgacagtctcttcatggctgccatctccgacgcctgtgagatgcacatcttcctcagggcctgcttcaggctcacggactccacaatctctgagctcgacactggcgacttcccaagcgcaataagccgcctatccgtgctcgtctgcccagaagccctcgccgacgtgcgcacgttgatcgatctgatgagctggtcaagatcatcctccaccgagcacgaccgtgccccaagctcctgccccactggcttgaccctcaccctcaagtgggtaagcccacacgaacgagcatctttcggctcgtccaccagttcgactatctccgagcacccaggagaacccatccccttcgagccttccggttccacaagctgcatcttcatctgggtgggaggccgtagaagggctgccgcatttcaagtcatcaggaccgacggttgcctgcacttaggtggccgacgaagccgctttcccgggccaagaaccggcatcacggagtccggacggcggcacccggggccgagggcgctggcgcggcacgcgaagggtggcggcggcgggagctgctacggctcgcgctcggtcggcggcgcgggttgctcccacttggagaagctggctgctgcgagcgaggatttgctagggttttctggccgaaacggcggcgaggagcggcgagagtgggggagtggcgtggggatgaggatgagttcaagcgggcgaaagcggcagcgctcggcagcaatgagcggcgcgcatcacgaggagcagatgatccagtggcctcctctcgctcgcccccttcttcc

SEQ ID NO: 5088 - DNA, 1461 bp, Zea mays
gcacgagacggcccaagagacgcgcaatgggaatccgacccgagtccgcttcccacgccccgcgcttctcttctcttctcttccccacacgaactcgccctctcgactctcgagagatagagcgaggcaccaagaaggggaaaaagagggacaggaaaaaaaaatcattctcgtttcgcgctgtccgctagaccccgcccgaatcaatggagattagggctccgccgacgagcctgaggctcgcgccgccgcccgcctccgccagcttccgccgaaccccgcttaggacctccttccttcgcggcagcgtgtcacttaaagttgtgcaagtacggcagtcaaatgtcaacagatttaagtgcaatagcatacgaagtaacctctttgataggctaacaagggttgtcaggtcctacgcaaatgcagttctaagttcgtttgaagaccctgagaagattctagaccaggcagttctggagatgaatgatgacttgacaaagatgcggcaggccactgcacaggtcttggcatctcaaaagcggcttgagaataaatataaagctgcagaacaagcttctgctgattggtatcggagggctcaacttgctcttcaaaagggtgacgaggatcttgctcgtgaagcccttaagcggcgtaaatcatatgctgacaatgcaagctccttaagatcccagcttgatcagcagaagggtgtagttgaaaatctgatttcaaatacccggcttcttgagagcaagatagcagaggccaagcagaaaaaggataccctaaaagctcgtgctcaatcagcaaagactgctacaaaagtgagtgaaatgttgggcaacgtgaatacaagtagcgccctttctgcatttgagaaaatggaggaaaaagttatggcgatggaatcccaagcagaggcactcggccagttagcaactgatgatttagaaggaaagtttgcactgcttgagacttcatctgttgatgatgatctttcacaactgaaaaaggaattgtctggaagctctttgaaaggagagcttcctccaggcagaacagcagtcagcaactcaggtgctgggcgccctttccccgacctagagattgaaagcgagctaaacgagctgcggaggaaagccaaggaatattaggttcattccttgtcgattcagcaggcctgacggaatctcatttccaagaaaatatagtgcagctgcagattgctccattgcgcgtttcgaaagttgaaacacaagtgcgcattgactgtttgttaaagagtatggaatcggctaatttctcggcattttccccctcgagtgacatttgtacagctatccataaaattgttgtaaatcactactctctctagagcctttttttgcatactatatatatagtcaaagttcgaagttcccaaaaaaaaaaaaaaaaaaacgcaatactcgtgccgaa

SEQ ID NO: 5089 - DNA, 3329 bp, Zea mays
atccttcccggcacgtgcgtgtctcccatcgccaggtagatccctttcctcacgccacgccgagagagaaaagatagagggagaggcaagagtcgcatcgcagacccagaccacgccgccgccacctccgccgccacttccgccggtgatcgagtcgcgtcggcgctaccttcaagctagaagacaataagcatcggcagacatgttcggctccaccaacccatttgggcagtcgtccacaagcccatttggccagacctcgtttggaactccacagggatttggccagtcttccactgctgccaacaatccttttgccccaaaaccatttggcagcccgaccacagcttttggggcacagaccggaagctcgctctttgcaactacatccactggtgcctttggccagcagcaatccactcccgcatttggcacaacatccactggtgcctttggccagcagcaatccactcccacatttggcacaacatcctcatctcagtttgggagctctacaccagccttcggtgcatcccccactcctgcctttggtgccacatcctctggatctttgttcggacagaagccaagttttgggggttttggatcatcttctagccagtcaagtccttttggtaacacgttccagcaaacacaaccaacatttggcagcagcacttttggttcatcaactccgccggcgtttggtgccacggctcctgcatttggcacaactacaccagcctttggcaccacaactgcaccagccttcggtgccacgactagcccagcatttggttcaacttcaacatctttatttggtgcttctagcgccccaatgtttggttcttcagcctttggcacatctgctactggttttggaacttcagggactacagcatttggtgtgagtagtactactccgggttttggatcatcaagcacaccttcatttggcacatcagctagtgcgttcagttttggttcgtcaccatcttttggacaaacagcagtttcctctggtagcactccctttggaacaactccctcaccttttggtgcaccagctcctgcgtttggctcacagacagcagcaccaacttttggacaaccacaatttgctaatcaagctggaggaaccagaataaaaccttattctcaaacaccagatgttgacagtgctactagtggtactcagcctgctgcaaaacttgattccatatcagcaatgcctgagtacaaagagaagagtcatgaagaattgaggtgggaagactaccagcgtggagacaaggggggaccgaacacttctggaactccaacattggcacctagccgtccttctcctataccggataacacttttgcttcgacaagtaatccattctcaacgaacccattttcaacaaacaacccgtttgctcctaagcccactacaactactagttcaccattcaacacctcatttaacaatgcatcagttgcaagttcgagtctattcacatcatcccctggtaccacaatgtttgggcaaccaggtgtttctacacttccagctccagcaagtaattcaccatcattatttggaaatatcaatcctgctcctgctacatcgtcaatatttgccacgtcagtgacgaataatccaagtccattcggcactggcacatcattggctaacactcaatcagccccactattttcctcagcatttgctcaaccgacatcaagtacaccggctttctcctctgggagcctatttggctcaactaatcctggcagtctgtttaccagcagcggtccttcacttttttcaacaccaacatttcaaccatctgcccctgctcagagttcgaacatgttctccttccaacccccaattcaaccagcagcttctaccggtggactcccttttttccccaacacaaatcaggccttgacgggacagccaacttctagcctgtccagtatggtcatgcagcctgctcttgtttcaaatccatttgggatgcttccagcaatgcctcagatgtccatcgggaatggtggatcttcaccttcagttcaatatggaatatcaagtttgccggttgcggagaagcctcttccaagtagatcattgtccatggcggttcctaggcatttgtcacagagaaggataaaactgctgccaagaaaatataatccaatatctgatggcaaggttccattctttgctgatgatgaagaatctccagcaacaccaaaggcagatgcttttttcatccctagagagaacccaaggaacctggtaattcgtccaattgagcagtggtcttcacggagagaaactggccggcaatatactgcaaagaatgttactgattcgaacaaatatgaagatgcttccattgaaagtgagcgtggtaagtctgccatgtcaccaagcagcaggccacctgtagtggaaaatgacaaacagcatgaggccagggccatggctcaacatgcgaatggaaatgctacttcagttgagaggctgttgcctaagcttccacgtgcagattacttcacagagcctagtatagaggagcttgcggccaaagaacgtgcggagccaggctactgcggtcgagtgagggacttcgttgtgggtcgacatgactacggcagcatcaaatttttcggggagacggacgtgaggtgcctcgatctggagtcaattgtggagtttaacgaccgggaggttattgtgtacaaggacgatagcaagaagccccctgtgggcgaggggctgaacaaggctgcagaggtgactctactgaacatcaagtgcgtaaacaagaagaccggggagccgtgccagggggcaagagtggagaggtacagggagatgctggtgaagaaggcggaggagcagggcgcagagtttgtgtccttcgacgctgtcaagggagagtggaagttcagggtgaagcacttcagcgcctacgggctttggtgaaatcctggggagttaagtagtttgtttgttctgatggagcaacgctttacgctcttgtcaattaccatgcttggatctgttgtgctgcttctgtacaatgttgctgctgttaaaatgcttgcaaattgcactgctctgctgctgaaaacaggagcagcagtagaaactaccgcaacaggagggcgtgctacctgctactgttatgtattattattattaactatattctaagtataataagacttagttttttaaataaaaaaatattactttatgcacttagatatatgctatgtatggagagagaataattatgtataatagtttataaaatgatcgtaacttt

SEQ ID NO: 5090 - DNA, 6084 bp, Zea mays
  misc_feature (5846)..(5846): n is a, c, g, or t
cttcagcgttccaggaaattgttgatgcatatggtgtagccaaatatcaagaagcaaatcctggagtattcaccatcgtgactttcccttttctatttgccgtcatgtttggtgattggggccatgggatttgcttgttacttgcaacactttatctgataatacgggagaagaaactagcttcacagaaacttggagacataatggagatgatgtttggtgggcgttatgtaattatgatgatggcagttttttcaatctacacaggattaatatacaatgaatttttctctgttccatttgggctttttggtaaatctgcctatgcatgccgtgattcttcttgtagtgatgctactactgaaggactaattaaggtaagagatgcatacccttttggtgtggaccctgtttggcatggtagccgcagcgagctgccgtttctcaattcactgaagatgaagatgtccattcttcttggagttgcacaaatgaaccttgggattgtgatcagctacttcaatgcaaaattttttaggaacagtcttaatgtgtggtaagtttattcaccttttagtagacaatttgacattccattttgagatgaggactacaacaatcgtgaagaagcatgtgatcctttaacagcgttgttacagacaacagattatgatttttccacgcttactcctttgaaacaggtaccagttcattccccagctgatcttcttgaacagcttatttggttacctgtccttgcttattattattaagtggtgcacggggtcaaaagcagatctataccatgttatgatctacatgttccttagcccaacagatgagattggtgaaaaccagttgtttagtggccagaagacagtgcaggtctatattccttgttgataagttctcttctgtgaagcagactggtctatcatgcctaaccatttttgccttttccaatgcagcttgttctgcttctgcttgctctggtgtctgtgccttggatgttgattccaaaacctcttctactgaagaagcaacatcagcaagtacgttcatacagtatcccacattctatcggtgacttgatgttatgtggctgcagttcacttttacactgactgtttttccatttcttttcgatcagaggcatcaaggtcaccagtacgctatgcttcagggcgttgatgaatcagtgggagcagagctgggggaacatcatgaggacgcacatgaccacgaggagtttgagttcggcgaagtttttgttcaccagctgattcacacgatagaatttgttctgggtgcagtctcaaacaccgcttcataccttcgtctttgggctctgaggtaatgctattttaagcagtatctttatttacacagcctcacctatgcacagtcccatacttcctttgtttggctgcaccctaatccacataggtgcattggagtgcagccaaacaagtcatttttattacctcactggctactaacgtgctactgatattctcctttcagtcttgcacactctgagttgtccactgtattctacgagaaagtactaatgacggcatatgggtaagcaaacaagtctctggagccattaaaataaacatcttcgcgcattctgaaatgccattgtttcttgtaggtttaacaatgttttcatccttattattggtgtcgtcatcttcatctttgccacgattggtgtcttgcttgttatggagaccctgagtgcattccttcacgcgctgaggcttcactgggtggagttccagaacaagttctatgaaggtgatggctacaagtttgccccattctccttcgcgctgattcgtgaggaggaagattgagcttgtctcaacatttgtatttattgtagccgataaaaaatctttggtggcctttgttcccagaccaaatcattttttcatctgttgtgtcggatgtggatcataaaccaccgtccctttgtttaaactgggacgaacagcatcatttttccttagctatgcagaggattcttgggtcggttggcaacagatatggggtgatgtcacccttgtatgatgctaataagtagttgccgattgggcggtgtgttggatataaataagcactgtattgaaggttagacaatctccatcacgttcattgtcaataaaataaagagtgctatttacgctgctggtgttaatcatctcctggtctgttgttaaccattgtcagtgcttcatcttatcccattgatactctgaatcagctgtctcttataaccaaagcaaaagctaaaccagaatcacgttataaaagtagttaaacatgtcgagtctgtctgcttgtgggcaatctagtaacataggtagctgcagcctagtttcgtcagtcgtcaacgacgttgggaacgctgctggtgctgcgcctagagctgctgaaaggtcccgtgacagtccggccaacgaacttgccggccttgctgagtccgctaccgaacgcgccaatgccggagccgacggcgccgatgcccgtgccaaccatcccaacgccggagccggccgcgctgacacccgtgccggcaacggtgccggccgccgcgatgcccgtgccggccacgttggtgaccgtggacgccatgccgcttgccgcgtccgcggcgccgctgacggcccccgtctcgctcttcaccttccgccgctcatccacggtctgcttctccagctccagggcctcccgcgcctctgcgttggtgaactggtggtacgccacctgcaatacagcttgcaagaggaacgtcagacaaccgctgcgaactgaacacggaaaggacgaggttgatcgatcctgccttaatgctgagcacgcccctgtccttcttgtccttgaccttggtcgtgtccagcgacgacagcagctgcaggtccacctcctgcacggtttccatctccaggtcgctcaggggcagcttggcgatgccaagcctcttgtcttgcttcatcttgtcctcatcgaacacctgggagggcagagaaaaaaagaagtgggtccttgccttaggagtacctcgctggaaggaaacaaacaagcagtgaggtttgtcagctcgtgcccacctcaagaattagggactgcgtctccttgtcctccgagatcagatggaacgtttcgttccaatgggggttgaggttgtcgtcaatgacgctggtcttctccttgaacattgggcggatgaacaagaccacgtaggggtcggatttgccgatgagttccttgttcttgagggattccgcgcggaccacagtgacagtgagcttcccgtgcggcttcagctcgaggtcactgcacaagggagcagatcacatgtgtctgtcattcaaacaacttttccaagtcgaaaagattaaacaacttcatgcacacgattcttagtagtagatcagactctattaacctgacgtctacgtcgactccacccagtggaacaatgattctgtgtggccactggagcatgtcagtgatcaatgacgccaccgtgtcctacagaagaataacggtgaaatatggttattttttcccttccaagatttgtagatacgaataaaacaagaggtgaaaacaaaagaaattaatttcatacgtcaatcatgtctgaaagcccaggcattgcggtcaggcttcctcccacggctttcagtatgtagtcgatcctcggttttggctgcaattgcatgaaaaccacgcgtctcaaaaaaaaaaacgcaaagaaacaaggcatattttcccttggcattgaaacaaaaagaaagattgttctcatacgcagcatctctgacaacgaagtgtttacgaactagaattcaaaaatcgaagcctatgtaacagaggactagatgcgtttcagtagctaaaagaatcacacctcggccagaagagcaacaacgacagcagatatgcatggtatctcgtccgacaactggaagacaacacggatgatggtgtacacctgaaggttcttaaactgtacacacacatacaaacaaacacgggaaaaatgattagtagaagatgcggaaacgaaatttgaggtttaaacatgagctcctgttcttttggaagagcgtcagcataaaatctcataccgcaggcaaacaattgtaaaggagtccaaaatgatctaactaagaaaatgcgtttttttattggtatgcttaagctgtaattaacaacaccagtccacacatggccaggcagctgatcctagcccgtctgaaatcagacatcgcctggccaggaactcataccacaccaccatccattcacgccctatttatacgtgcaaatactttcacgataaaatttgacacacttcgataaaaatgtgggaaattaaagctgctaatatcccttttggccacgggtctgtggagatctgcaaacctgaatgggaagcgaagcaacaagtgtctcgactgcaagaatgatatttggatccccgccccagcggaagtccatgtccattgtaatctgccctttcttaaaactgtgaatccgaatgcctgagcacagaatagcttaagtcatggccaaatcctatgagagcgtatacaagttgacaccattttgtcttggcaaccttctattttcggtggaacagtcccaagggagagcctgctgaacttcagcgaggatatccctggtggtcgataatcatcgagtatcggttcgacagaatccctgatgaccatggttgctgcctgcaattagatgcaactgcgaataaggacggttgttggcatcaaaacggtagatctgtatgtttcttaaaatgtaagtaacttcgtcctaaactgtttgcccgcataatgaagttttctgaagaaaccaaagctatcaatcttaccgcttccacgaagggccaaagcttgctcaactgtttgttgagccatttgacctgaaaggagaaccaaaaaaaatatataacaagggaaacatgcaagcaacagatcaagggggcatgtatactgtaggagaagcaacagcaagatatggaataggtggatgtgtcatttcccaggttttatgcatcgaagagttatgaagttcatagatatgggctgcaaaaagttttctctctgcggaagtttttgtctagcaattacaacaataaaaattcagataacttatgcgatagtcaatagcttgatatcacgggacattttacggttccatgattatatctacaccaaggcaggtagcatttcacctgttcgtattctggaaatgatatccactggggaagactttctccacatattttcttcacgtcttcacggttgagagatcccaacgaactgataaccgcagcctgtttcaaaacatgccattatgttgaaatttatcccaatcaataatgcacaaattcaatcaaaggcatacagcacacttttaacaaccgatctgtatttaacaacacccaaaggcagaaaaatcaagaccagataaccgaaggatgaagatcgaaactttttatgatcgcatacatcgaatcggaatgatgtagcggcacctaccttgttgctgcgtttggcggcgcggcgagccatggcgcgtgcccagcctgcgatcagggcgacgccgacgatcatccccattacgactcccgatatgaatcccatttcttctgtcttttttttctcaacgagccgagaaagagaggaaaccacggaggaagacaaaaatttcaagtacaagattatctattacgtacggaaattcttggatcaaatcgtagacgattgtctctccaaattgtttattacttctaacactgcatttgggancaattttttcgcgtgctactagtaataataaagagaggggagagacgagagagagagagggtaatgtgcgaatggtgagaaggttgtcacggcgaattttgcatggctggatctctgcgatcagtgtgcttgacgagcctttggttccacacaggcccgatacttacatggaccaggcccatatagcgaaactaaacttgaagaatgaagactcttaatataatcatcataaaaaata

SEQ ID NO: 5091 - DNA, 1419 bp, Zea mays
aaccctgcttccagtgcaagtgactgaccccgtgacccgacccatcataacaaatcaaaccatcacccgatttgtttacccccgaaaatttgccgtcttctcgtctcgctcccctctttgcgccgcccccagatccggcaccgcccgctgctcgaacccgcaccccacgcccgcaggccgggaccggtgggcgcgcgccgggcagtaggagggagaggaagggcggcatggcggcgccgccggcgagggcccgggccgactacgactaccttatcaagcttcttctcattggggatagcggtgttggcaagagttgcctcctgttgcggttctctgatggttccttcactacaagctttattaccacaattggtattgactttaagatacggacaatagaattggatggtaagcgtataaagctacagatttgggatacagcgggccaagaacgcttccgtactattaccactgcgtactaccgtggagctatgggtatcttgctggtttatgatgtcaccgatgaatcttctttcaacaacatccgaaactggattcggaacattgagcaacatgcctctgataatgtcaacaaaattttggtgggcaacaaggccgatatggacgaaagcaagagggccgtacctactgcgaaaggacaagcacttgctgatgagtatgggatcaagttttttgaaacgagtgccaagacaaacctgaacgtggagcaagtgttcttctccatcgcacgtgacatcaagcagaggcttgcagagactgattcaaagccagaggacaaggcaatcaaaattaacaagccagaccagggttccgaggcaccagctgcccagcgatctgcatgctgcggttcataagcagacgcacgatagccataatcattggttatttgacactatttatttcctgcttggcttttataggaagaatttgaggaagccacttatgatatactgatgatgtggttgtactcttgtttgcttccactcttcgaagcaaacacctcttgctgttgacgtagctattgcactctggacatccgttggaacaacctctctcctccctacagactacagtgtgtaatggacgaattccatgccgttgggtttgcattatcgatcaatgcatggattaacgtatcgcccttgtgtggattgttgtgttttttttctctcatgttgctgttcctttagattgaatttgttgggaaggaaaatatattttccttttcttatgtatatcaggtgcatttttatcttttgtacctggaatgtatgtatccacggaaagcgtgaatcttcaatttagaaaagaagaaaacttatctggaaatataagaccagtgcatgcggtattgtttgaataaaaaatataataaaacttatacatttgtatatctct

SEQ ID NO: 5092 - DNA, 1491 bp, Zea mays
ggcccatattattgtgcttatatatattataacaagtcctaagaactaatcattattcctctaatccaaagtttgtaacaacatgttttttttggtttttttttttttttttttttcaaccaaacgtaggtagtcttattgcaatcttgagtttagtctacatagccataaaacacaacaatatgagaaaagaggcacaggaaaataccatgaaggcatgaagcagctcagccagtgatcatggtgcctgtgccctcgtctgtgagaatctcaagcagaagagagtgtggaacacgcccatcaatgatacttgcggtgtgtacaccttgtgccagggcgtgaacacagcactccaccttgggtatcatcccaccagctaccttcccgtcagccaccatcttccgcaccccagcaatgtcgaccaccttcaccaggctcccagggtcattacggtccgccaaaatgccagacacatccgtgagcaacagcagcttctcggcgcccacggcagcggcaatctcgccagccgctgtatcagcattgatgttataggcttgcccagtctcgtcggcggcaacggtggcgataaccgggatatggcccgcggcgatgatgggatggaggacggtggcgtccacgcgcgaaacctcgccgacgaatcccagcgccgctgcatttggagacgggcgagcggtgataaggcgcgcgtccttgccgcacagaccaatggcggtgcctcccgcgatgttgatgagggaaacaaggtttttgttgaccttcccgactagcaccatctcgacgacctccatggtgagcgcgtccgtgacacggaggccgtcgcggaactgcggctcgacgccgacgcgcagcagccaggaattaatctccggaccgccgccgtgaacgagcacggggcggaggccgacgcaggagagcagcacgagatcgcggatcacggacgcctgcagctccggggacttcatcgccgcaccgccgtacttgaccaccaccgtcttgcctttgaatcgctgaataaaagggagcgcctccgagagcacgtccactcgactcagcgacgcggtggcagcggcagccgacgaaggagccggcgcagccgtggatgtggcggagatgcggaggcggctgcgacggcaagtaggggcggcaacggggcttgcatggttggagctgagagtagggctcgacggcggcggggatgggactggaaggagcgagttggagaggtagggtttcgtgaggaccatggctgcggtggctggggctcgagctcgactcgccgctggcgttcgacgaaatgtttagaccgaaaggtttagaccgaaagtttcttctgacgcggcgttactttccgttatcctggctgctggacacgattaagtttctaaatttaaatttctaaattcccaaataagaaatttttagttttcgtatttgttaatttaaaataaataaaatagagagactaaaaaa

SEQ ID NO: 5093 - DNA, 1313 bp, Zea mays
gcggtgggctccctcgcggccggcccggaccccagcgtagcggagccggcagccaagcagaaaaatacgagtatcgcacgcgcaaggcgattccgtccccattctccacccaatagggagctagagctacgagagggggaaacggggggacgggaataggcgtcgtcggccatgtcgtcgtcgtggaactcggtgggtctggcgatcctgtaccaggtgctgggctgggtcgccttcgccgcgtggtccttcagcttctacccgcaggtcctcctcaactacaagcgcaagagtgttgtgggcctgaatttcgattttctggtgttgaacttgacaaagcactcgtcctacctcatatacaatgctgctctcttcttcagcccattcatccagcaacagtatcatgacaaatatggtgacaaagagatgattcctgttgctgcaaatgatgttgctttttcactgcatgctgtagcattgacagcctttaccgtttttcaagtattcatatatgagcgaggaacacagaaagtctccaaagtttgcatatcaatttctgctattgtctggatcgcggctcttgtttgcctcattattgcttggccaaaaagtgactggctttggcttattgatgtattcaattcaatacaagttggcatgacagcaatcaagtacatccctcaggccatcatgaacttcaggcggaagagcacaattggttggagcgttggcaatatattacttgatctcacaggaggggtgctgaatttttgtcagatgggtgtgcagtctatagatcaacatactttggtgaatttctatggaaacattgggaaaacccttctttcattggagacggttttctttgatgtcctgttcattatccaacactacgtgttgtaccctgtcaagaaggacgagaatggtaaggcaatcatttctgaaagggtagccccccttatcaggccttcggacaagcctgaagaagataacgtatgatctagctgtagttatattgcgcacattgcattcacgcgctgtttgcacacaggccacacacgcatgcgaattatttgttcaaaaggaattgctggcgcgtcttgattatattactgcttataacttttactacttggtgcactggtgagagatgtctcatataccaggttgcgggtttcaagtggccccgtttttattatcgtgatttgtgaaggttattagatatcatctcggccaacatttacgatcaatgctcatgtaaatatttggttgcattacatttctatggtttcataaaaaaaaacacacacccc

SEQ ID NO: 5094 - DNA, 955 bp, Zea mays
ctatagatctagtaaaacttatgattggttgacaactgaaaaaacaagattatttttctttttgagacagtggaagcaactattagacaagtcaagtttaacagtacagtacacgtgaatacttcgccctcaagtcctcaacccacacaaccaacaaatacgtgtagtactcatcagatctatacaacgataaacactcacctgaaaaaggacagaaggtgagcacagataccctgctcaactaacagttgatgcagtctatctcttcaacactgctgtgcatgaagtaacccacacaaactgcaaccaatactattaccgggatcaatagcctcagcacaagccacagcgtggaacccttgctaccatcggcagggaagaatctcctaagcatttccgccagtggccataagagctcacgcttcttgtttactgcctgactcatttggccattatcttccgtgtcttcaagcttgctcaacttggaaatcatgttgccatataatttggcatcccttcttttgtactccttgaccttctcctttagcctcttgtaccccatcttcacatccctgttgtcaggatctatttctagagctttcttgatatctgcctctgccaaatcaagatcaacaagatgcatgtgtgcctgtgcccttctgtacaaggccttcacgtttgtgttgtcagattccaggacctcggtacacagttcctttgcttccttgtaatcattaagtcttagtttacatgcggcattgttgagcttgcagcttatctgaagtggtttcgatagctgcttctcttcttcagtgaaggagctgtcgcgctcggccgaccccgaagccttttcatatctcttagaagccctggcatacttgccaattttaaaccacacattcccttcttctttcttcttagcagctgcttcaatcttctcagcaacgttcttcaa

SEQ ID NO: 5095 - DNA, 1384 bp, Zea mays
cattgggtacctcgaggccggccggggcctctgatgagtgagcccatcagctcgcgtctggctctcgcaggcggcaggtcgcagagcagcccagccccagacccacctcgtccgcttcgtcctctcgtctcctcgcactcgctagctgacgctgcgtgcgccaaaagcagcactgcagcagcaggtccagccgtcgccgttcccacttcccaccactgccacgcgcgccccggatcgagggagggcacgcagacgcggaggagggaggatgagtctcttcgggcttggacggaaccagaagacattccgccccaagaagagcgctccatcaggcagcaagggagcacagctccgtaagcacatagatgccactctcggcagtggaaaccttagggaagctgtgaggttgcctcctggagaggatatcaatgaatggcttgctgtcaataccgtggatttctttaaccaagttaatatgctgtatggcacgctcacagaattctgcacacctgagagctgcccgacaatgacagctggcccaaagtatgagtacagatgggctgatggtgtgcagataaagaaacccatagaggtatcagcaccaaaatatatggagtatctgatggattggattgaaggccagcttgacgatgaatccatatttcctcaaaaacttggcacaccattcccaccaaacttcaaggaagtagtgaagacaatattcaagcgcttgtttcgtgtttatgcccacatctaccactctcatttccagaagattgttagccttaaagaggaggcccatctcaatacctgtttcaagcacttcattctgtttacaaatgagtttggcctgattgacaagaaggagctggctccactccaggagctcattgaatccatcatcgttccttactgagactacggtgtagtaaacgtggatatagagctctcagtgcagatggctgtgaagtgtccatccgtgacagaacttcactgcatagagctatatgtgcatgtacctgtgtgtttctaaatgatcatgtattggccatgtaagtgtgcctgttatcagttataaaagggtgatgatgatcatgtactgcaaaaagagaaagcacaagaatgtgttggattgatgtatgcagtgtttattttcctcctggttgtggaaccgtcagtttgtctgcttattgctagacattctctccgttctataaattgtaggtcgttttaattttgctccaactttgatcaagtttacatgcaaatatttcgacatgcaaaaccaaataaatgtattgtcaatgctcccacgatttaatgtaactactctcatgtactaaaaaaaaaaaaaaaaaattcgagactagttctctcctcgtgc

SEQ ID NO: 5096 - DNA, 3433 bp, Zea mays
ggtgggtagaatctgggtgtttggatacgcagattatgagattgtagattctgattaaaaaaagaaaacagataaatacaaacaaccaactagtgcattaattccgttggggcctgttgtatgcattgacagcattagaaatacatgttggcattctcttagtgctatgagttggtattctgtattaatttttataccaactgtatttgacatcaattccgctcgaattagtttattttttaaatatcatgtaagtttgtgtttgtttttttatccggttagaatctaggtatttggatacgcagattatgagattgtagattcttagtgaaaaaagaaaataggcaaagacacaataattaaaacctgattaaaattatacatgatttgtctattacaatataactattgaccggttcagataacaaaccatgacactaagcattagctttttttcggcatggatgtaaatggcccgtatatctatctaatataatgctcgtaattaacatcacggctaaagtgttgatgattactgatcgtcctagtacagttagtgcgtatttaccagtaatataatcgatgtgggttgagataaagagagagtcagacgtacgtacgaagcagatgagaccaggattcacgagacttcacacggacgtggtgctgagctgcttctccgcagtcgttgaaaacctgcttctcagaaaatcggcggtggctagaatcacctcagaatctagacgtttggacaccaaaacccgcttatggcggccagaatcggctgaaaagtcgaaccaaacacgggccatgatggatctcagctggagtccacttcatggtaaattctaaattcaaaaaaaaatattagagaaaccgagcataaacataatgtagacggcaggcatcaaagcaagtgtatgcatggctctggcctacacccacgtactacggcggcggcggcagcagcatcggagttgagagtaccgtcgcacgtgacgtgagacgttcaatggtccatccatgatatggatggaatcatttgacgctactactacgaggcgggaggggagatgataagcatccctgctactgctactgctacgcaagcaggccatcaagtttggcacgcgcgaatatgttcttcgttagctttatatatagaagaataagaaatatatactatgatcttatggtcgctatgtttgtgcgatgcgttgtcgatcgctccctccgactgtattattaacgtgtgtgtgtgtgtgtgtattcagatagatagatgccttggtcaagagcatctgcagtgcctcaatgaccattagctgtatacgtactatggagcaataatagagcgccacctgatttctaattatttggaccataattaagcactcgacattgatttcttaggctcaagggaaatcgaaatgttcgatccaaccattattccaagatgcccagatagattagatagaaagcgagtcaagtaacggatggagcacatatccatccatttgcttgccgcccctgctccaccaccatcaccgtaccatattatcctatcctatcgagcaagagcacagatgccctcagcctgctctcccctcgcgttctcgccacggcctacggcgctatatataaagcagggggaacccccgaccagccagacccacacaaagccaaggcgcggcgcagccagagtaagcagagagttgcactaccgtgcttcttcagttcttcttcctagtatgcactcgcttgtgaggcgtggcaatggctacggctacggctatggtggttacggcagcagcaatccccatatgaactaccaccgccaaaacaccgagtccgtgaccaccgtcgtcacggagatgaaccgaatggccgtcgacgacaagccctgctacggcggcggcgtgcagaagcaggcctgcaaggtggaggcgttccaggagcacgacgaagcgtacaagggcgccgtggccgtgcagcagaagcactcctccttcaaggaggacaaggaggaggtgcgcggtgctgctgccgccgtcagaagctggcacgacgagttatacaaggaggaggaggaggagaagcgcgtcgtcgacacggagtacggtgcccgctacgggggtgtggccgccgtgaagaagccgggctacaactacaagcagcacgaggcatacggggagaccgaaggtgcagggtacggctacggcgccggcggcgtgaagaagcaagcaggctacagctacgcgcaggaggcgtgcggagagagctacggcggcgctcaccacggtggtgccggtgccgtcgcgcagacgtacgcctacgaccagcagcaggcctacaagcacaagaacgcggcaggggcgggggcggggtacggtgctccctacggtggtggcgccgtgcagcagcacgacggacacaaagatgtgtaccggcacggcgccgccgccggtggcaaagtaaagaagaacggctaccagtaccaagaggcgtacggcggaactgacgcaggagggtacggtgcgcactacggcggcggtggtggcgccgtgcagcagtacgggtacggcggcgccactaccgatggcaaagtgaagaagggcggccaccagtactacggcggaagtggtgcaggagggtacgactctcactacggcggcggcggcggtggcgccgtgcagcagtacggcggctaccataaagatgcgtacgggtacggcggcggcgccaccgccggtggaaaagcgaagaagagcggctaccagtacgaggaggcgtacgctggaactggcgcgggaggatacggcgctcactatggtggtggcgccgccgtcgctcagaagcaaggctacaggcagggcatatacgagagcgagagcgagagcgaaagcgagagcgagagcgacgagagcgactgcgaggaggcgttcctgccgcacggcggccggacgccgcagggcggcgtgcagcacagctacggctacgggggcggggcgtacaagcacggggctggcaacctcggcggcttgcgccgctaccagtcgtacgagagccgcgaggatctcggcggcggacgccgctacgagacctaccagagcaccgtccagtacaccggctccccgaccaagaaccgccacgtcctacgctacggcgcgtaggcatatatacgctctgatccagttgcattgcagcacgtgcacctacgtatattcctatgccgcgtcgtgtgactcgtgtcgtataggcaggcggcaccgctacttggtgggccttgtgtttgctggtgcagatcgaaaaatctgacaataagatgtacttaatgccaccttgatataataatgtatgaagacgaaactttgaaaactgttttacgcgggcggccgcccccgcggcggtgctcagtactgcaggcatgcaa

SEQ ID NO: 5097 - DNA, 1805 bp, Zea mays
gcacgagaccattacctagaacatcctaatcgaaaacataaatagcaagggccttggattgtttggccagggatagcacgccgaggaaggtcgacatgtcgtctccgccgccgccggtgaagctgatcggcttcttcggcagcccgtacgcgttccgcgcggaggcggcgctgtgcctgaaaggcgtgccgtacgagctgatcctggaggacctgttcggcagcaagagcgagctcctgctccaccacaaccccgtgcacaagaaggtgcccgtgctcctccacggcgacggcagggccatctccgagtccctcgtcatcgccgagtacgtcgacgaggccttcgacgggccgccgctgctccccgccgacccctacgcgcgcgccgccgcccgcttctgggccgacttcatcgagaccaggctcaccaagcccttcttcatggcgatctgggtggaggagcgcgacgcgcgcctgcggcattgggtacctcgaggccggccgggagcgcacctcatctcgctccaagcacaccaccactccacagtgcacttcactctacagcaacgacagaaaagtgagcagcagacagcagcagctgctgccatggaggcgtggagatctctcctcgcgagcttcgtgctcgccgtgctggccgcgcaggccttggtggccgtggtcgagtccaggaccggccccgtggagcaggcgagccaaggtgacgacgtgaagaagccggactgcgtgccggggatggacccgcgctcgttcccagggaccggcggcggccacggcatcacgcccgtgacgccatcgcacggaggctccagctccccgacgccgtcccacggcggcggcggcgggtacgttccaacgccgtcgcatggcgggacgctgcctttcccgtcccacggcggctccggctccggctcctctccgacgtcgccctccaccggtggcggctcgtacggtggatccccgtctactcccggaggcggcgcgtacggtgggtctcctccgtccacccccagcggcggcggcgcgtacggtgggtctccgtctacccccagcggtggcggcgcctacggaggcgggtccccctcgcctgctcatggtgctggtggcgcctatgggagctctccgacgcccgcgtacggcgattcccccttgcacggcggcatcgggacctcgtcaccgacgacatttgtccccatggacccccacagcttcggcacctgcgactactggaggtcgcacccgatggagatctggtcggcggtcggcggccggttcccgagcacgtcatcgtcgatgggccacttcttcggcgcggcggcgggcaacgtgggcggggctgacgtgatgagcatccaggacgcggtgggcaacacgcgggcggacggcacgggcgcgctgctgcgcgagggcgccgccgcgctgctcaactccatgacccgcgccgggttcccctacaccacggagcaggtccgcgacgctttcgcggcggcggcggcggccgggtccgacggcgcggccgcggcgcaggcggcggccttccggaaggccaacgagggcaaggcgtagctgcctgtgctgtgctatatgcatgcatggttaattagttggagtgctccggtcgcttaatctgttggatttggtggtttgttggttgtgtgcgcgtgtgtttcagtgatttgctcctttttttttctttctcgtggatctatcgatggatgaacatgaatgaatgaaccgaactgcacagctccgttgtgagctgatgcatgcatgcatgcacatgcacta

SEQ ID NO: 5098 - DNA, 1406 bp, Zea mays
actcgcccactcccgtgaaccccaaaacccttcctccccaaacaaccggcggcggcgcgagggcttcgctttgcatccatggctctcgtcgccggctcctacgagcgcttcatctggggcttctcactcaaaaccctgacaaccccctccgccaccggcgcctcgccctccgagaccctcaccctcgcgccgctcttctcgtacccggcccacacgggcccggtgcgctgcgtggccgcggcgccgcgggcggggctggtggcctccggcggcgcggacgactccgtccgcctctacgacctcccttccgccgcggacctcggcccgctcctggacccctcggccgccgtctccgcactcgccttctactcccggggccccgtgccgcggaacctcctggccgcctgcgacgacggctcgctccacatctacgacgccgacggcttcgcgctgctctccacgctccgcgccttcccgcgccacgaggccgccgaggcgctcgccgtgcacccgtcgggccgggtcgcgctcgccgtcggccgcgcgggggcgcttgccatgctcaacctcgtccgcggccgacgcagcttcgcatgccgcctcgagcaccctgcgtccgcgatcgcctacgctgaggacagggatggcggggaccgattcgtgatggctgccgagaacaaggtcagcgtgcacgactccgtggatgccagggttattcatgatatggactgtggcaagaaggtgctcgccatggcgcccgcaaagagtggggtcctttacactggtggcgaggaccgttgtattactgcatgggatctgtccagcggcaaggtctcctcacgcattgagggtgcccatgcaactcgtgtaaaaggggttgttgtttttggtaatagcaatgatggatcacagctctccaatctaatttcttctgcttcgtccgatggtgtcataaggatatgggacattcgaacaatcgggaacggaaagcctactccattagcagaggctaatacaaaagcaaggctaacttgtcttgctggaacgtcactgaaatgactcaaggaacctacagtttgctaggcgtctgattctgcattgttagctgaattagaaaacctggaaatgaaagaagaaattgaaggtgaaagatctggcacgcgagcattatctgtgtgcgtttggaacgtatccatccattatgtacaccgacatagttttggcttagtgtctgagctgcataacttatttatatttgattgcgcgacaagttttgcaatgagaaccgttttcagtactaactgtgcaattgcatcacgtacgggactgagttctctgtcaagagagtcattgacgccacaagttattgcagtggcaatcatttccagtttgcatcatttggcatg

SEQ ID NO: 5099 - DNA, 2582 bp, Zea mays
cttcaagttccagcaacaccattgataccgagggtgctgaaactactgaacttcagagacataaagatactgcttgtcctggactcaagagacaagattcatcaaaatccgtacaagataatcaacatcctggacatgagaataagcaaccaaagataattaagaagatactaacaactctaagagaggagagcaaatttagggaaagcaattctcctgttagagctagccgtgtaaagctaaattcacctagcaatagagaacgctcatctgacgactcaaagcaaagtgatatttcctccagttcaaggtctagtgaagttatgtcacatgaatcagcaaatgcaagctgtgaacctgtcaaacgaggacatgcatctcctcccttgaagcatttggtaaggataaatggttttcttgtgctaaaagcgtaaatccatttctctaagtttgctaattcttgcctcgcccccctcgatcctgctgtcaccaattgttgagcattctccgaaggttaaaattaaagtagatgagctattacatccacaccttgccaagcaggttggagaagttgttgatgcagctgcagggaaggttaagaacagaacaccgcccatttttattaaatgcaccagtattcctactcggaggcaaggagtagcaagtccaagccgtcaacacactggggtaaagcgagctcacaataaggtcatggcagagcatgcaaggaatccttgtcagcatctccatagtccaagcaacgctcttgtgaaacttccaagtgttccaatggttcctccaagtcatctagaagatcttaagagaaaaccagacaatacacgagcaaaatctgctcctcctagggctttagcaaccaaggaagacaacagtgcttgctccagttctacgattggtaatgctgaaaacaccaaccagtctgaaccgtctgaacctgactcaccaacttatttggtctcatcctgcaaatgtttgatacctgacactatcatacaaaagcacggcataacaagtaaagcgagttcagaaatcatcacaaccaattgtgagaaaaaaatgactagtaatggtgatcttagtctaagcgccgccatggtgcaatcttctgatattcctgaacaagagtttatttgcaaggatggaatgctctccagtcaggtgggtcagtgcagtgaaacagttactgtaccaagcgatgaagacaagttcacagtgcgcgaactgctttcatcagtaccagatctttcttcctttgtcccaacaacaatgatgaacactgagccaggaagaggtcccactctcacccagtcatcagagaaaccatcgggtcctcatttaaatcctcctccagttgaggacattatacatgtcataagccacagcagtttccatgtgaatggtgagcaggcagtaaaagaaactggatcagagagcattgatgttgacaaacgtcttaacatggtaagagaagagataggtgtaagaagcaccgagccaaacctcataccttctggacctatagattctgatacggtgaagccaaatgtagtagaagctaatattacctttcagaaaccatccagtacagatgccataaaattgccaaccataccggaaggaaattttagtactctggagaccaacaatgggtttaagcaggaagcagctccggctaaggaaatactagatgtgacatccttcaggcagcgagctgaggctctggaaggtctcttagaactttctgcagaattactggaacacagtaggctggaggagcttgcgattgttctaaagccatttgggaaggccaaggtgtcccctcgagagacagcaatatggttggctaaaagtttcaaaggcttgatgaatgacgaagcaagccgcagttcaacgtgagtacgcatagcttttgtgccaccctttttactttggttgatttctgcttgtgctctgaagatgctatggttgtcttgttcatatctggcttcttggtatcgtgtgtccgctgtttccatttcgatagttattcattctttacagcacatgttgtaaatagcccagatttgtgaacagaaaataatacatgccagaaatggtgttaatttacatggttgaaaaaaaagagactaatttgatcaattattgttttgcctacgtgctcctctgaaactatcagaattctacgagaaaaggtacaaaattgtgttgttgcatttgttgtcagtatacttagtttctcaactactcttagaacatcccacaccacatatgagcatcttgattaaagtatgtgactatttagtaagccgatttagcatccgacacacacaagtcctttttgttcaggcagagttgcattttttgcagtaattatactccttcatttcctatactgaaaccgcagaacctacaccatataagcttacaaatccccccttgttatatgtgatgctcacactgttgggacttgggacggctttgttttatagcctctttgttttgtagccttactagctggttgcagttggagctccatttgttcccaagcagcttcgccactttct

SEQ ID NO: 5100 - DNA, 2504 bp, Zea mays
gttcctggcttgggccgaacaaccccgtattgggctaccgctgcagcggttcattttcaccacgcgtgcgctctctctgtctgcgacgactgggctacgccgccgccgccgtcctccgtctggtgccgaggtcttcgttggacccttcgcccgcgactagcgtccgccaggtgccaggctgaaggcgatggcgacggagaggaggcgcgcgtcagtcgtggtactgggcgacatcggccgcagcccgcggatgcaataccactccctctcgctcgctaaccaggccagtatggaagtggacattgttgcaaatggaggaagtgatcctcacttgtcactgagagagaatccatcaattcacatccacgagatgaaaacagtgcagttaactggaatttcaaagatatctggtgctctgtcacttctacttaaagctgctgtccagttcattttgctggtttggtttctttgttttaagattcctcgccctgatgtcttttttgttcagaatccaccctctgttccaacactggctgctgtaaaactggcaagctggctgagaggtgctaaatttattgttgattggcataactttggatatacattgctggggttgtcgcatggcagaagtcacattattgtcaaaatctatttctggtttgagaagtactttgggcagatggctgatggtgccttttgtgttacaaaagcaatgcagcatgagcttgctcaaaattggggaatcagggcgacagttctttatgatcaatctcctgatttttttcaccctgcttcattgatggagaaacatgggttgtttagcaggctagggaattccatgtgtagtgctatgggcaatgctgattgcatatcagtggaggaagtaggggaagacatgaacactactgcctttaccagtaagattgatggccaagttttcttgaagcctaacaggccagcacttgttgtgagcagcacaagctggacgccagatgaagatttcagcatacttttggaagcagcactaatgtacgacagacgcgtcgctgcagctttaggtgaagatgattcaatggatgaggggcaactttggattgatatcaagaacgggaagcagtttgtctacccaagattactgttcattattacaggtaaaggacctgataggaagaaatatgaggatcaaataaaaaggttgaagttgagacgtgttgccttgcggacaatgtggcttgcatcagaggactaccctttattgctcgggtcagctgatctaggagtgtcgttgcatacatcttcgtcagggctggacctaccaatgaaggtggttgatatgtttggatgcggattgcctgtttgtgctgcttcattctcctgcattgaggagcttgtaaaagtaaacaaaaatggtcttcttttctcaacatcttcggagcttgctgatgaacttatgatgctctttaaggggtttccagaagaatgcaatgccttgaaatccctcaaagaaggtgccatgaagtcagcatcatcttcgaaatggtcaacagaatgggaaaccaatgcactacctttggtggaccaggtcattggatgagatgtgtgcttacatacatcagatagaattgttgtattgcagagaaccagagatcggtgtactagagagaccagatgtacattaaagggtacggtttgctttcaccaaaaatcaattgctagttgctgccagtgccatgtgcaccacttcagcaaaacttgggcaagtttgtagctacgaagctctttcctttttagactgggaaacatactctgctgaacacatgtctaagttgtttcaggatgtatactactgtaggccagcactttgtttgataatatggtctgtattggaatacctctaatctgttacgtcagaaggaaaacatagaaaaccatattgttttccctggcttcgaaggccatctgataagatcctatgcagagaggcgtgtaccaaacagaagtgtacaaggaatcaggatctctagcacgatgtctggagaatgaaaaggatatgtcagatgcatggtcctatcttatgtttacacactgctacaaatacactctgaatcagttctgatccatttgacctcttcgtcctcggcctctacctttcctttcggggccatctggactgcttggtcatcccctgttgcagtatcagggaacgctgggcttcagggtgtgccttcttgagcagcaaacctcagacaacctgtcaaacaggaaagccatgcgtgagtaactctgaaattctgaacaggttcggttctgaaatctgaatgcgacctgaactctatagcacctcgtcgaatcccatttcgggtacgggtacagtttccctcaagcttggcctgggccgaggacctccgaaggctcttgttgcgagtaccctgaacgaccttggcctaccaatgcctccattcctggaggtggaagaacagctcagaagccgctacgagctgcag

SEQ ID NO: 5101 - DNA, 1887 bp, Zea mays
gcacgagaccattacctagaacatcctaatcgaaaactactgtagccgctgctgctcctctcctcccatctcaccacacaccgcagccccagcaagatcgcgcggaggccatggcgaagcccaagccttcctccgccggcgccaagccgaccgcggctgcgccaccggttacagtgcactcggcgctggtcacctacacctccatgctcgcgctcctctccctctgcccgcccttcgtcatcctcctgtggtacacgatggtgcacgcggacggatcggtggtgcggacttacgagcacctcagggatcacggcgtgctcgaggggctaaaggccatctggcccatgcccaccctcgtcgcgtggaagatcatcttcggcttcgggctcttcgaggccgtcctacagctgctgctccctgggaagcgcttcgaagggcccatctcgcctgccgggaacgtgccggtctacaaggcaaatggcttacaagcatatgcagtgaccttgataacttaccttggtttgtggtggttcggtatatttaaccctgcaatagtgtatgatcacttgggggagatatactctgctcttgtttttggaagctttgtattctgtatttttctctacataaagggccatgtatttccatcttcatctgactctggatcctctgggaatgtgataattgacttctactggggtatggagctgtaccctcggattggcaagtactttgatatcaaagtcttcaccaactgtcgtttcggtatgatgtcctgggctgttcttgccgtaacctattgcataaagcagtatgaaatgaatggcagagttgctgattctatgcttgtgaatactgcacttatgttgatctatatcactaagttcttttggtgggaatctggatattggtgtactatggacattgctcatgatagagctggtttctatatctgctggggatgcttggtatgggttccatccatatatacttcccctggaatgtaccttgtaaaccaccctttgaatttgggcccccagctagcactctcaattcttctagctggaatgttgtgcatatacataaactatgattgtgaccgtcagcgccaagaatttcgacggacgaatgggaaatgctcggtctggggcaaggctccatctaagattgttgcctcttatcagactacaaagggagaaactaaaaccagtcttctcttgacttctggatggtggggcttgtcacgtcacttccactatgtcccagagatactatctgcatttttctggactgttccagctcttttcaatcacttcctaccatacttctacgtgatctttctgactatattattgtttgaccgagcaaagagggatgatgaccggtgctcatcaaagtacgggaagtactggaagatttactgcaacaaagtaccatacagagtcattcctggcatttactgagcatctcgagttctggacgactcttgatattaagctcaacagatgccacgatatccagtcttcataccgatttgctactgattgtgtaatgtcgatggtaggcttgggctgtacgcagtattaggtgtaggcaacttggcttttggcatttaccttgtatgtgtcgtgtatctagggctggggcttgctccttcagttgttagacagtagggggtaatctcaggggtgcaatgtactccctccgtcctaaaataaaagcatatctagtatttaaattttgttccaaataaaaatgcacaatgaactatcatatcgtgtaacgatgtctttgattgtgggacaaactagctggagatgggatggtggatttgaaggatatgaaaggatcatgatgctgaagaggaagggtgaattgagcccccct

SEQ ID NO: 5102 - DNA, 1632 bp, Zea mays
caggcacccgacggacggatgggctggggcggctataaacatcggggcgtccctcccggccggcgggatcaccaaacgccggtggagtcactcgagcccgcccgggtctcttcctcttccattgattccattcaagatcactactgttaccagccagccagtcgttcgttaagaagagagcgagcgagcaagagagagagagagagggagaagggggaagatcagaacgaagagagggagatgagggggcaaacgcagacagcttccgcggggggccggtggcgaggcgacggcgctgcggcgtggtgttggtggtgggtggccgtggtcctcctgcttggccatttaccgagctgcgcgcgcgcggggctgctggagtccaacccgggcctggcctacaacttctacaagaacagctgccccagcgtggactccatcgtccgcagcgtcacctgggcgcaggtcgccgccaaccctgccctcccggctcgcctcctccgcctccacttccatgactgcttcgtcaagggctgcgacgcgtcgatcctgctggacaccgcgcagagcgagaagacggcggcgccgaacctgtcggtgggcgggtacgaggtgatcgacgcgatcaaggcgcagctggagagggcgtgcccgggcgtggtgtcgtgcgccgacatcgtggcgctggcggcgcgcgacgccgtgtcgtaccagttcaaggcgtcgctgtggcaggtggagacggggcggcgcgacggcacggtgtcgctggcgtccaacacgggggcgctgccgtcgcccttcgcgggcttcgcgggcctgctgcagagcttctcggaccgggggctgaacctgacggacctcgtggcgctgtcgggggcgcacaccatcggcgtggcaagctgctccagcgtcaccccgcgcctgtaccaggggaacgccagcagcgtggacccgctgctggactcggcctacgcgcggacgctcatgtcgtcgtgccccaacccgtcgccggcgtcggccaccgtggcgctggacggaggcacgccgttccggttcgacagcagttactactccagggtgcagcagaagcagggcacgctggcctccgacgccgcgctggcgcagaacgccgccgccgcgcagatggtggccgatctcaccaaccccatcaagttctacgccgccttctccatgtccatgaagaagatgggccgcgtcgacgtgctcaccggcgccaacggccagatcaggaagcagtgccgccaggtcaacacctcctgatcaacaaggcgtcacagggaggggccatggtttttccctcttcgttcttctctttttctgcaccgcctggtattattgttccatgcatccggtttcggctcggcttcggctcggcgcgcatcaaatatatttcgcccccgcgccgtgattgagggccctcctccgacgaaagaaatccattgctttctttgttatttatattagtttactcactgtcctgtgttccattgtcttgccttgcaaaaatgtaagaaagattaaagatgtaagcaaaaaaaaaaacaatgcggatcatccactctaaaaaaaaaaaaaaaaaaaccgtccttttttaaaaaaaaaaaaaaaaaa

SEQ ID NO: 5103 - DNA, 1770 bp, Zea mays
gcgtgcccagtgtctgacaacgcgccccaaccccaaccccaacccagcggtcccagtcccccctccgttctctctgcactctgcagctgccggtgccggccatggcgcgcgccccgagctcgtggacgccgtccctcgccatggtgctcctcgtcgtggccgccgcggccgtggtcgcgtcgtcggaggcggccagggtgcccgccgccgtcggcaactggacgggggaggagctgcgcggggccgcggcgaggcggggcggccggcgctcccggcgccgcgcgttcgagaacggcctcggccggacgccgcagatggggtggaatagctggaaccacttcggctgcgggatcaacgagaacctcatcaagcagacagctgatgcgctggtcaacaccggtctggcgaagctgggctacgagtatgtcaacatagatgattgctgggcggagtctgacagggactaccagggaagcttcgttgcaaacagacaaaccttcccctctggcatcaaggcgctcgcggactacgtgcacgccaaggggctcaagcttggcatctacagcgatgctgggacacggacgtgcagccagaaaatgccagggtcacttgaccacgaggagcaggacgtgaagacattctcgtcctggggtatcgattatctgaaatacgacaactgcaacgacgccggcaggagcgtcatggagaggtatacgaagatgagcaacgctatgaagacgtatgggaagggcatcttcttctcgctgtgcgaatgggggaggcaaaaccctgctacctgggcaggcggcatggggaacagctggagaacgaccgatgatatcgccgacaactggggcagcatgacgtctcgtgcagaccagaacgacaggtgggcttcctacgccggacctggcgggtggaacgatcctgacatgcttgaggtgggcaacggcggcatgtccgaggcggagtaccgctctcacttcagcatctgggcactcgccaaggctccgcttctgatcgggtgcgacgtgcgggcgatgagccagcagacgatgggcatactcagcaactcggaagtcatcgccgtgaaccaagatagccaaggtgcgcagggaaagaaagtgcagtccagcaatggcttggaggtttgggctgggccgctcagcaacaacaggaaggccgtggttctctggaaccggcagggataccaggcaaccatcaccgcacagtggtcgagcatcgggctcgcttcttccactgctgtcactgctcgcgatctatgggcgcactcgtcgttctcggctcaaggccagctatcagcttcggtgccacctcacgactgcaagatgtatgtcttgacgccgaactagctcagaagacaagagcggattgttccatggcgcgtgggatgcaaccattcggtcaggattcagggaagaagagtatgcagtgcaggcaaggatttcaagagaaggaaattcgatatcatttggttatacaggatatgagtgcgaatggaggaataatttatactaatactatggaagtgtatctaaggcgccgtcaaaatgccggtgcctgtgttactggatgtttgtaacgagagttgcagcaataaaattggcttgcccaccaccaaaaataaaaacatgtggacggatttcagagaacaagagaatatagaaaatgtgcgttctctgtgaagtgatgttactaatgttatatcccatgaattcttaataaggtcatcggcactcatgctactct

SEQ ID NO: 5104 - DNA, 1522 bp, Zea mays
cgaaacgtttcacgtgagcaaacctgggcgtattcctctctctttcctcatcctcatccgagtggctctctccttgtgctgtggcggcggcggcgcccggctctgctcggacggactccaccgaaggcgctcggctcccctcgggctccaccccccgcggccggccctctgactgcaccgacggtgcccgccccccctcggcatccaccagcggtgcccggctccaagtccccgccgccactccgaccgtcctctagcagctccgtccggtggtccggccagctgcctagctccctccgaccgtccggccagcaccgcctcctgctcgcggcctcgcccagctcctccgccctccgctgagacgcagatcttggtgcggcagggcaccacagaggctgtgcgtgtgctggtggcctggtgcttgcaaccgagagccagtgtccagcctgccagctcagcccggcgccaaccgcccagcggctggctcgggcagcggccagtggccaacagctgacaaccatacctcgtttcttcggcgtcctccgccgctgcccccaactatgcatcctgttccagtctcctcccagccctttaccgcaactcctgcaaaaaaacttgtttcaaggagcactgctgtgaggaaggccatccattttgtcaacctgcggacagctggaaggtctagtggaaacctggctatgaactccgtaccgaaaccagcacttgggtccgaaacatcttggagggaggattttgctgtgggggataaggatgctgtggtcattgttgatcatgggtcaagacgccaagaatccaatctcatgctaaatgactttgttgagatgttccgggcgaagactagctatagtattgttgaggctgctcatatggagctagcggagcctactataaaggatgcttttggaaaatgtgtgcaacaaggagcatcacgagttattgtcagtccatatttcctttcccctggacgacactggaagcaagacattcctgctttagcagcagaggcatcaaaggagcactcaaatataccctatattgtcactgcccctcttgggctgcatgagcttatggtggatatcatgaatgatcgcatcaagtactgcctgcgacatgttgcgggtgatgtcgatgagtgtacagtgtgtgctggaaccggaaagtgccgcctgtactcctgatggagcatacctgggaggcacatcgatactgttaccatttattatgagatctggagaatacgagatctgaccatattctgagcagatcgtcagaattagacaagtgccaaattagttatgctgtgcatgcttgcgaacatcaatagtgatagagattcattagctaatcttgagtttatttacataacgaacaaactcagtcaagtgctctgatatttccattcacatgtaatctatattcctgctaccttgtagttgaatgaattaacatggatcaaatgataatataatgtgcgcttgtttgatttgccagttttttgttt

SEQ ID NO: 5105 - DNA, 2223 bp, Zea mays
  misc_feature (17)..(17): n is a, c, g, or t
  misc_feature (20)..(20): n is a, c, g, or t
ggcacgagcgcctcttngcnccgggagcccgtgctcgggggcccccggccggcgcggcgtggccagcgctgatttcgagggggtcgggctgtgtttcttcggcgccgcagcaggcgcggagggtggtcccatggtgttggaggactcgaccgcgtctgcagccacggtcgaggcggaggccagggtcgcggctggtgggaggagtgtcttcgccgtggactgcgtgccgctgtggggctacacttccatatgcggccgccgtccggagatggaggatgccgttgctatagtgccgcgattctttgacttgccactctggttgctcaccggcaatgcgatggtcgatggcctcgatcccatgacgttccgcttacctgcacatttctttggtgtctatgacggacacggtggtgcacaggtagcaaattactgtcgggaacgcctccatgtggccctactggagcagctgagcaggatagaggagactgcgtgtgcagctaacttgggagacatggagttcaagaaacagtgggaaaaggtctttgtggattcttatgctagagtggatgacgaggttgggggaaacacgatgaggggaggtggtgaagaagcaggcacaagtgatgctgctatgacactcgtgccagaacctgtggcacctgagacggtgggttcgacggcggtcgtcgctgtcatctgctcctcacatatcattgtctccaactgtggagattcacgggcagtgctctgccgaggcaagcagcctgtgcctctgtcggtggatcataaacctaacagggaggatgagtatgcaaggattgaggcagagggtggcaaggtcatacaatggaacggttatcgagttttcggtgttcttgcaatgtcgcgatcaattggtgacagatatctgaagccatggataattccagtcccagaggtaacaatagttccgcgggctaaggatgacgagtgccttattcttgccagtgacggcctctgggatgtaatgtcaaatgaagaggtatgtgaaatcgctcgcaagcggatacttctgtggcacaaaaagaacagcacaagctcatcatcagccccacgggttggtgactccgcagactcagccgctcaagcggctgctgaatgcttgtcaaagcttgctcttcagaaggggagcaaagacaacattactgtcgtggtagttgatctgaaagcacagcgcaagttcaagagcaaaacttaaccgtgacaagcgtagcaacaagttgctaagaacctatagattcggacagtcccaagttcggtcattttagttcgctgctttagtgcattgcttagcccagttccttatttttctcagttctttttaagccatgccaagggctgtattccccgtatacggtacagatcgcgaaatccctatcagggatggtttggtgatatcagggtttatatgttttcctgaccgtggtgactgtcctgttttcattcttctttcttcgctgccctgtattcattttgtcaagctggggcaggcatccaagtatttggcaatgtatatttgagcttgcaggatacaaaggaaacgaattgttatgaagggtacgtatcctgcctgcctgaatttgggaatctatcaactgcatcagctggtaatataagtatggactcgcaatctggatactggtggagagaacctaatggtccagaagggctgagttgtgctaaaaaagtttgaggcaacaaccgtagtgtacataagtttctactcaacttctgcatggtaaagttttatgacaaaaaggatcatattaatgttgaaaaaatccttacggttaatgaagctaaagatgtcccctgaaaataagcaagatgaaactatgtaaagaaatatgctaagcaagtctacttagagttttacacaataattaacagtttagcacaaacaagggaacaactagataagcaacaagaataattaacagttcagagcacagacatcctagaaccatagtttgggaaccttattttctgaaggatcatagtttggaaatcccttggaaaattgaatttcccaaactagccctcattaagagagataaggagcattcctaatggactgctgtgtaattgactggatgttagactgccactttactcatcatggagctcttttgaatgtgtgtgtatatatatatatatatatatatatatatatatatatatata

SEQ ID NO: 5106 - DNA, 4042 bp, Zea mays
  misc_feature (4011)..(4011): n is a, c, g, or t
  misc_feature (4042)..(4042): n is a, c, g, or t
cttccccttctttcaccggcctcgagtcacacgcgtgagatctgtgccttccgccgcggccacatgccacacaacgacgcccggcgagcttcaccgcgatagaggtaggcccgcccgataccaaggaggatggcggcagtgggcgttggtgcagcggacgagcggtgggcttcgttgtgcaactgcgtggtgaacttcttgctggaggagcggtatcacctcacggcgctagagctattgcaggagctccaggaggacggccgctccgcgcacgccctccgcctccgcgctttcttctccgacccagcgcttttcccgcccgatctcgtcgcccgctcatcctctgcgccgcccggtgctgatccacagattttgctagaagagaaaatagcagcagaagaaaagttggcactcacggagtatgatctgcgcctagccaaagaagacctttcacagttgaagcttgaattacaaaaacaaaaagaatcatctcctgatgattcaaatgggctccttttgggtgcttctatacgcgaaggatatactaggcaacaagaaaattgggatgtgaaaatttcagcattaggccctctaaaggataatgaacgaaaagatcttaattgcgctgtaaaagaatacttgcttttggcagggtatcgacttgctgttatgacattcattgaggaggttcctgatcaagaccttgatgtttggccaaacagttcagcttgtgttcctgatgcccttcgcccgtcgttctatcagtatctttcttctactgcagaggctgcagacgaaaaaatatccatacttcaggaaaatgaaacattactcaaggacaatgaacgactcaatgctgaaaatgattccttgatgaagagcagggaaggagctaatagtcaggttgccgctttaaggaagtctttggaagctgcacacaaggatataaaagacaaggaaaaaatgattcaagacttgaggcagtcactggatgtccagaggaaggagctgaatgactgcagagctgaaatcacagccctgaagatgtacatcgaagggactcaatcaatcaaacaattgtttgttggaactagtgatggtgtaaagtcgcattcctttgctaattctgtgggagcatcatcattgaataatgaagatgaagattcaaaaggatctgaagccataacaaataagctagcatcagcagtaaatattactgatgatacgcagaaagatcgccaagttctagaaagtagcgctgaaggttcctcagtttcagaaactccagtgtctttcacagctgttgagaatgacagctatggtacatcaaaagaagataaatctgtgtcaaatatctcatcgaataatgtatgttttcagagtaatctgcatggagcttccatgactggtaaaagccaggggagttcagatggcatatccatgtatttatctattgagaaactagagagcccaagtaaacaaaaatcttcagataagattgctttggagactataaagatagtttcagatgcacttccaaagattgttccttatgtgctcataaaccatcgtgaggaacttcttccattgatcatatgtgctatagaaaagcatccagatagcgatgtacgggattccttgactcatacattgtttaacctgataaaacggcctgatggagaacagagacgcatcataatggatgcttgtgtagaattagcaaagagcgttggtgagatgaggacagaaactgagttacttccacaatgttgggagcagataaaccaccaatatgaggagcgcagattgcttgttgctcagtcgtgcggtgaacttgccgtttatgtccgtccagagatacgagattccctcattttatccattgtgcaacaacttgtcgaagatgctgcaacagttgtaagggaagctgcaacacataacctggcattgcttcttcctatgtttccaaatctggacaaatattataaggttgaggagctaatgttccaattggtctgtgacccgtctggggcggttgtggaagttgcactcaaggaacttgttcctgctgtagtaagatggggagataaattggatcagatatcaagagtactattggctcatatcctggcatctgctcagcgatgtccacctatttcaggtgttgaaggtacaatagactctcatcttcgtgttttaggagaacaagagcgctggaatattggtgtccttcttcggatgttgactgagttgcttccatttattcatcagaaagctatacaaacttgcccctttgcatcagctgatccaacaagctctacaccagagaacttctcagcatcctgcctaaaatcatatgcaacaggtgactctgagtggtcagcatttgagtggatgcacactgattgcctgccagatttgatcaagcttgcctgcttgttgcctgtgaaagaagataacttaagaaccatcatcacaaagtacctcttggaagtatctggactctacggtaaagattatctggagcacattatgctacctgtatttcttgtagctgctggtgacattgatagtggcgattttacctattttcctctatcaatccagccaaaagtccgtggcttgcgtccgaaaacttcaactgctgaaaaacttgccatcatgtgtgtcttcccattattgttatctggtattttgggttctccttccagtcgtcaacagttggaagagtatctgagaaaagtacttatccaaaacaccaaggatggttcattttctatgcatcatactactgagatcattaacgcagttcggtttctttgcttatttgtggagcaccatagtgtcatctttaacattttgtgggagatggttgcgagctcggataccagcctgaaaataaatgctgcggctctactgagagcacttgtaccctacacggatgtgaaaatagcatcaactcatattttgccagcacttgttacccttggctctgatcaaaacttgaaagtaaaatatgccagtatagatgcatttggagctgttgctcagcatttcaaaaatgacatggttgttgacaaaatacgcattcaaatggatgcttttcttgaagatggatcacatgaagcttctgtttctgttattcgtgcacttgcagtagctgtacctcattcaacagataggctacgtgaatatcttttaaccaagatatttaagatgacatgcatcacacctgtcggcaatgatattgaacggcgtcgtgaaagagcaaatgtactctgtgaagcgctccgggctctggatgctacagatcttcctgctatgggtatacgtgatttgcttctgccatcaatacaaaatctgttaaaagatctggatgctctagaccctgcgcacaaggaggctttagaaatcataagccgggaaaggtcagggggtacgctggaaagcattagcaaggtaatgggggcgcatcttgggattgcatcatctgtcagcagtttctttggtgagaacagtctcctcacaaagaaagaaggtggcgaggaacatgatcctgctggccccaccgctcctgagcaaaacctgcaggctcagccagagagcacgaggtttggtcgcataatgaggagcggatttggagacatattgcgaggtcaaagcaaaggacagtgatgcacttagattgaaatgatcaattacatacatagctgccgataccacattctttctttgtaagttgacagaatatacctcaagggttgtatgttatttgccgaggtaaaaaaaaaacgatttgacgttgccaatctagcatcaaacttcctgtatgtaagttgcctgtagttagctgcccatttataagatgctaataattgtgtctttgtttcatttgtttttataaataaaatatataactagatatgagacaaaaaaaaaaaaaaaactgaaatttggatgttatagttggctgacatcatgtaattgatctgcattggttgaaggaacggngggttctgaactcaaaaaaaaaaaaaaaaan

SEQ ID NO: 5107 - DNA, 3008 bp, Zea mays
gcacgccgtaaaaggccaaaaacctaaacatacgcgcctaactccgcgtcctcccccccctccctcgaagcggccaaggcggcggcagcagtgccggcatgggcgcaatgtcggcttcgatttcgtcggtgaattggctagtcgaggatgacatcctcctcaagaacgccgtcgaggctggtgcttcgttagagtccttagccagaggagctgtatgtttttcccgtaaattcactcttcatgaaatacaggaccgctggaattcattgctatatgacccagatatctcaacacaagcagcttctcggatggctgagtatgagaatgaactttctacttccgatccagccaaggcacataaacttttcaactcaaaagcaaaggatttttcatttcagaaacggaaaatagacagtgtaaagaatctatattatgcgatgagaaaaagagtacgcaatgatccacgcaacagtggcgaccttggatttcttgtcccctgttcgtgtacggcaattggtagtgagtgtatctgtggaggcctacctaacaatattgaaccagagctgaattcagtaagccgctatgggcaagtaggttcaaggtacaccattggacattcatattctgaaatgaacgaacatgcttttcatacgaagcatactgaaagcatgacaagagatggggatggcaccagtaatgttgtgtatggctactcagatgtaggccaactatatgaacatcatgcgtacacagcgaataatcatgggaatagagaagggaacaatctttctctaaagagtatcacaaattttcaggattctatgcagtttcagcagttggacaacaatcaatgtggtaatggggtggtagactcaaaggctttggtgatctctaaccatttcagtggaagtgtgcaggaacctatgcctctccaaatgattggtcaacctgagggttctgaagcaccaggtggtgcaatcttgagtggggttcagcgaagcgacaggctcgctcttgctgatgataaggatgtaaaatcagaagacagggaccctctcacatttgaagcgcatttagatggtgggatatctggtttagatcacgctactgagtttatggacttcccatatttcactaatagtgaagaccttgatatcctgaatagtgaaaatcttttgaattctccaagtgagggaatccaggaggatttagacgatactgcattagttgttcatggggttagatcaaccatgcaaaatctggttcatgctgatgaagccaatatgtcctgtgatcaaatagatcttggtgatgtgaaaaataatgtagatgcttctggtataatcttatttcctacttcattagtagtgccctgtcctggcctgtatgttgagtgcaaattgaacacagaagatactgaaattccttgcaacgacgatgtttctacaccaacagagtatcctcttgaatgctgtacttctacctttgggcagaaatctgagaatactatctattccgtctcccctgcaatcagccctccatcaattgctgaacagcccaacccatccacttcagaacaaaaagaagattcagtggctcatgacgaaggtggtgtcctaggagctaaaccatcagaaggtgctttaacagttggaggccttttgcctggtaacattgacacaaatgatgcaaacacatgcatgctagctttgccttcttttagcactgctggatttggtgaaggatcaccttgtagtttaggaccacacgagagctttgataactctcatggtttgactttgcaaaattcagttcaagctcctgatcagatgcaacacaactcacttgatggtaaaccagaattaggtgacaaggctgctctacagaactgtatgccatcaaatgcactgcccgatttggatattcagaacactattgcaaatgcgccaacaccagctcaagcagaagaatgccctgactatgaaaaagatgttccaaattactatgatctagaagctttgattcttgaccaggatcttatcccgtgggaccaagactccgattttatgcatcctgaagttaccggatttcctcacccggaaagcaggaaggcattgattagattggagcaaggtgctcggtcttgtatgaacagagctatcatgtcgcatggtgcctttgcagttatctatggattgcacttgagatgctacataaaggatcctgaggttactcttggaagagagacagaagacattaaagttgacattgatttaggaaaagaagggagggcaaataagatatctcgccgacaggcggttatcaagatggatgaatctgggtattttcatattaagaacactggaaaatgtccaatctttgttaatagcaaggaaataccaagctgcaaacgcatcaacctaagctcagactcattaatcgagataaaggacatgaggtttattttccacgtaaaccaagaggctgtgaggcagtacattgatcgtgacctgaagccagaacgctaatttcccctggctttccagtcagcagcagcctgtgagtgactgcctcattaacagcaatagaagtagcatagcagtaaatttgagtaagcattgctcgtttaggatgttccttcatatgatgttaacaagttaggttcacttggctccggtctgtaaatggttgtagtttgttgcgttttctgtctgtttggcgggcataaatcatgcatataaccagcgcatttgcttccagtttgtacctacactcccaggaatgatttcatttgtaatactggcaccctagattgtggtgactgccgccaagagcaagaggcatccaatgcaataaagtgcggaaaagaatcaatagaagggtagattctagggtagaacaggaggagggtgcacttgtgcaagaaaccattcggttcttgcgacgctataagcataaactttattggtttttatttatataccctgatgatcttgaagcaaagggac

SEQ ID NO: 5108 - DNA, 1900 bp, Zea mays
acaccatacaaccgacgactgcatttaatgatcattctcggttcatttgctatttttctcgtacaattatgctgtatatatataacaaaaaaatgttctcagtttacctgcctactaagaggaccttcctcagcaggtcatcgataaaaaaccaccgctcacgctcacattcaacaatgctgcattacagttgtcattgcatttcatctgctatactttttttgtatattaagtaaagcaaacaaatggccttattggacctattggtgcagtacccttccacaatatgaagagaacattcaggtggaatggaagcaaatttatacggctgcccctttcacttgtcggccaggaaatgttcagctattatctggtggcctagaagaccagcaattgatacatagagccacacttagtgaagtctataaatacgagtattacttctgttttgatattcaagcacaattgttgtcagacttgtttccgtcgccctcaggtcaacagtgctctgaaaaggtaatcccagcatctacaggaccatggagatcttcaaactttatttgatatcaatacagctgctggtccctaaagatccatcctaccaaggaagtctgataacctgatactttttgcaattactgtacttccatcatcagcatcaagatgccgcagtattacctcttccaagcggccatctctgtaggcatgcttatagaaacaacttgttccgaaggggcatgagccagtcccaaagtcgaagtacttgcaatcaatagacttgagcttggatttgtagctttcagtgatctcctctttctcttcctttgagaagtaccaaagaacacttggaatgacatagtatgaaagtttccgacatattggacaagccctcaatgctgagttcacatccataccagatgcaggagaattgctacgccaatttctaatgcattcaatacagaaaggatgatcacattcggataagagtccaaacttcctttcagcagcagtaggctttgaaagcacacgatccaaacatacactacattctatttcttggctgcgtttcagagctacaaggcgtttgtgatttttctcacataacttgatatgctcctccctctcatcaggacgataaggatgcaagcacagttttccacaggttgcacacagatctccatgcatttgagggcacccttccccataaggacaattaccagcagcagcaaaagaacaaatagggagatccacaggtttcaatgatgtctggtttatcaaattttgattagaagaccagtcaattccatcatctgaaacaatatcatgctgaaaatcatttctccatgcaggcttactggcagaatgtgccaacacatccacagatatctgatgtctttggttgcttgaatctgtttggtgcaccatatgaggtggatgattgtaacttgaaagttgaagagaagtagatgcacgtcttgattttgattaggatgttctaggtaatggtactcgtgcggttccgagaaactttgacatggccatatctgcaacggctaccatacgagcatgcacctttttggtagaatgtgcaaacattatttgcttgatcactccagtcgtgggagaattcacagtactctcctttcaagcaagctccatgcatgaagaacttgcaaagaactttcttagtcgacatggccgaggcaaaccgatcggacaagccagcccgcgtcgcgcagctactagaggcgactaacagcgccgtcacctagcttcgcccctgatttgaatccttcccagcacgtcgccacggcctagggattgcttgaaactggtgtgccttcctcaggttcctttctctcctcggcccttgcgcgtcgccttttgaggctttccgatt

SEQ ID NO: 5109 - DNA, 2921 bp, Zea mays
  misc_feature (908)..(908): n is a, c, g, or t
  misc_feature (966)..(966): n is a, c, g, or t
  misc_feature (1124)..(1124): n is a, c, g, or t
  misc_feature (2914)..(2914): n is a, c, g, or t
cgtgcaatcaaaccatccagagcatccaatctagatccaacggtttcatatgtaaggggttaaaagtaaactaggttctatgtttcaggtggaaagggttaaatttaaaataacagtcatcattggatctagattagatgcaccaaatcgcttgattgcacgtttgtaccaatataagtgactgcataagatattttcccgttcaaactgtctcaaccgatattggacaagcttttcttcaattggttctacctttagtctatggcgtatattttcattcgttcattccggactcgatcccttcttgtatggccacaaatccaatgtaacacacatattttcgcaacacttatctgttgaacatgtcgtctttttgtagaccaatattctgcaccatacaacatagcaggtcccatcgtcatactataaaactctccttttagcttctgtggtatcctcttatcatatagaacgccagatgcttgacgcaacttcatctaccctactttaattttatggctaacattttcatcaatcttcgtctctatgtagcattgatcctaaaaacctagatgtgtccttcttaggcactactagcagcttactagcggttgaacaccaactggttcatagttgttccttctgagatttcatataacagggagggcaggatcaccccctttggccccaactaaccatactgacataatcctgtagtgtgttccttccaagaaaagttcaaactattgaatgcaattatgcaaagctatgcccatacaatcaatttacaccctgtttggacacatagttacaaagttacctgtgagagatttttacgtggtggtaacgagaatgaccccgcctatccgggtcatggacgaagttcccatgtggctaccactgtaccnattccttgtgactatggtttggaacacgagtgttacaatacaatttttcttcatgaantaggagcccccccccccccctaaaaaaagagtaattggggactttatgatttgtcatatgcaacccaacgatcagtttttgtgaagttcatagaattttaaaattcctctagatgttcaaatataaggaatgcgttaagccttattaaccaacaatancaacaagaagaactttatctaacattgttacttgttaagcctgaatgttttggtactgatgcacttaacagtactactgtattgcactttcatctacacaggaagaactttatccggcattgttactcttccctgcggagaacaaaagtgcaatagcatatgaagggggaatgtcagtgtctcacttaatcgaatttttggagtctcatgtgagcaattctcgctatctattggaatataaaggttagtggataaacatcttgtgactgcattggttctacttaaaatatttgaatttgcttatagttctgtaatgtgtgttagcttacactttacaacactattgtttcttagaagttgtgttaatcttctcatacatgaaagtactaagtatcaaccttgctcatgtgctgtttacctgtttggcataccagcctagtttaccattcttatctagactggcagctgcttggctgtggattacgttgttctagacgttcctagacgttccccaaacctgaagtgccaccacactaaggatatgtgctgtttggttcggcacatgtggttcggcctaatatataatctgtaacaaggatcgggtacgggttgtgcaatgctgataccacattaccgcccacctcccagctttgtctgattatgcccgcggactcccttctcctgttctcttctcacaactttgtcctctccactcaacttgcggatctcacattctcgcccctatgttccgtgtgttgccagcctgtttgttcccagccaacctgttacctttgttgctagccaaacacaattaaggaaatgcaagatgttaaaaattcgaaccaaacgaattgtattttgccttacactgtgacagattgcactgcaacctgattacattagcagtacgactcccaggaccgaaccaaacagcattagttaaaatgtcacatgcatgttctgaagcttattttcttcttggtactcaggatttatgtggaagaagagaatgacaccacagcacgatgcaccacaggcaattcagtttaaagtcagtgataaaggtagcggcaatgttggttctgagttaccaagtcatccaggtgtcgttacaggatccatccttactgccactaagaagctcgggaccgcagttccatttgataatgccaaggtgctcattgtgtcagctgattctcatgaaggatttcatggcttgatcatcaacaagcgattaagctggggtgtcttcaaggatctggatagctcgatggagcctattaagcatgcaccacttttctatggtgggcctgttgtggtgcagggttatcatcttgtaagcttgtcaagagtatcctcggaggggtacatgcaagtcataccaggcgtctattatggcaacatagttgccacaagccgggtagtcacacggatcaagttgggcgagcaatctgtcaatggcctgtggttcttcctaggctactcggggtggggatacaaccaactttttgatgagctaactgaaggagcatggcttgtgagtgtgaagccgattgagcatttggactggccgaaaagttgaaagggttctgtggacctcacgcctcagctgtttctttaggaaaattcagttcatcttgcacatatctgccactctgcccacactgcaccgtgacattgtactgagcttttttttggaacatagcagcactgtgttttcataccattcaccccgtactatggtcacatattttttatacatagtacttttcttatagtggaaaaaaaantgagttg

SEQ ID NO: 5110 - DNA, 2684 bp, Zea mays
aaaaacatataagtctatgatctgtaattattcaaaatttataaaatagtactaaccataaatagagactacaccaaaaaaaaatactatagaaataaaaaaatgtgtgcgcaacgccacacaaaaattccagtaatactttattcgttcgtaaagagtcaaagcatctaaaatttaaacaaatttataaaataaaaataatatttataatataaaccaatattattaaattctttaatacttttatagtatatttgaatttataattttatctatattttttaaaagttttacaatgtgaaagggaggtagtagtattatataaaaaatttcgcacgggctgacgtggactgaattccggaaaggacgtctcctccacgcctgctccctctctctagagctgactttaggacattggaggctttgacgccttcggtgtccttgcgtccgcgtcgtgtccgcgcgcctgctgcccgccaacccgcctctcccaaatcccatccaaattcctccgcgtctttcgaagatcatattttgggaggggcaccgcccccagatcggggaggaatccccattccgtctggtgggtcggtctcccctgtccgtttttggctcttttcccctctcacaagggcggctcttggatgggctgcctgccgtgcttcgggtcggctggtgagggggcggccaaggagggcggtgcgcgcaaggacggtacgtcggatcttcgcgtcacccgggtcgaatcagataaatcaaaaccacagggtggactagactctaagaaggatgcagtcattttgagggaggggaataatcaacatattgcagcacacactttcacttttcgtgaacttgcagctgccactaagaacttcagacaagattgcttattgggtgagggaggttttggtcgtgtttataaaggacgtttggagaatggacaggttgttgcagtgaagcaacttgatcgcaatggccttcaaggaaacagggagtttctggttgaggttctaatgcttagtctgttgcaccatgacaatctagtaaacttaattggatactgcgctgatggagaccaacgtcttcttgtatacgagtttatgccattgggatcacttgaggatcatttgcatgatattccacctgataaggaacctctggactggaatacacgtatgaagattgctgctggtgccgccaagggcttagagtacttgcatgataaggcaagtcctcctgttatttacagggatttcaagtcctcaaacattctactcggtgaagggtttcatccgaagctatcagacttcggccttgccaaacttggccctgttggtgacaagactcacgtttcaacacgtgtcatgggaacttatggctactgtgctccagagtatgcaatgacagggcagcttacagctaaatctgatgtatatagttttggtgttgtgttccttgaactgattactggccgcaaagcaattgacaacacaaaaccccatggagagcaaaacctagttgcatgggctcgtcctctattcaaggaccgcagaaaattccctaaaatggctgatccgtcacttcagggctgtttccccatgaggggactgtatcaagctctagctgttgctgcaatgtgtttgcaagagcaggctgctacccgcccctttataggtgacgtggtcaccgctctttcatacctagcttctcacacatatgatccaaatgcgcctgctcaacataatcggagtaattcatctactccgagggttagccgaggtggtgggagcaatgaccaacgccgtctccgctcatcaaaccaccactctccagatttgagaagggaagtcaccacagcatcaagatacgacgatgaggttagcagggcaaactctggtactggttctggtcgccggtctggcttggatgatgcggatatgtcaggctcacaattgggtagccctgctcacactggaaggaagaggggatctcctaggacttctgaaagccagcatgctatagcagaggccaaaacatatggggaaaattcaagaggcagaaagtgaccaaactctcagagcagcattgaccgtatgagcagaatgctgaaccagatggttcatccattcatcattcatagaaaaaaaaatgataagttccttgctagcgccagacaggaacattgcatcagtccatctaggtcccttggtctttgtgaatagagctttcctcttttccctttacgggctattgccactgcttcttaacttctccatacaaatatcattgccaccacaaccaccatcagaactcccattcctgtcatctattcctcatgaatgcaatcatcatgcttacgagccttcgtcgtcacggtgtataacaacattcggttcacaatgtggaggtaaggcaaacatctgctctggggagcacaggatctcatccagttgggcatcttctgttgctgttgcatgctgggtgtcagcagtcacaccattgtcgaggggtgtgatgttctttttcttgaatggtttgtacctggggttacagcagttcacctgtgtttgatacatctgccttgtgacatttttgtgttgagttgtcggaacacatctattatcatctctaccataaaattgttgtggcccttgcatcttatccaaaaaaaaaggccccta

SEQ ID NO: 5111 - DNA, 2668 bp, Zea mays
cggatggggatggggcggcggcggctcacgcggggtggggaggggaggcgggggaacgaacgcgggtgtgggcgggcgaacggtgtggattcacagaagcgaacggatggtacagattcaccgaaggcagaacacaaaaaggcaggctactattgcttacttaataagtagtagagatttgcgcccatcttcaatgttaaggaaaagcataacgtttgtgctgccgcgataattgctgtctgcgtttgggtcccaccgccagggggccggtcgacgtctccgtccacgggtcaggtctcctcccgctgcccgacgcaaggagccattgaccacccaagggcccctgcctaggacggccccacctgtctgtcgtgccgctgatcgcccgtcgctgatggggcccggccagcccacccacccctccgcacgtcacggcgtaacgcgcggcgcgacccatccgtcccctccgtgttctgtccgcatgcgcgcgccgcccgtaattcttttccgccgcgagtcgcggcgcccgctcgtggccggtgcgcgcgtccacaaccgccgccaccgccttcccacttccaaatacgcctgctgccactttccccattcctgtctgaccatccccacgcccccctgctgtggcctctgctctctcctgccagttcacctgctgcctccggtgcccgctgctgtgcctcgctcgctcaccaccaccaatcgccaccccgtgcggcagccgcgctgccatcccgcggaggactggaggagcacgcatatccgagccttccctgccgcgtcgcatggactcatgctgtcgcgggccgcctcccgcatcgcctccaaccgggtgcctgcctaactggccgattttcttcctcgcgtagccccattccgcagcacaaatagcgcgtcactttcccaatttctatcgcgtgccccccttccgatcctgccatttcgtgcatcctgtagcgtctggcagtgcgggggtcatcggggatggagtgggtggacaggaccaaggcctccgccgccgccgccgcagcggcggcggacgagagggctgggggagcggaagggctcgcgggatacgtcaaggtcatgaccgacgaacagatggaggtgctccgcaagcagatctccatctacgccaccatctgcgagcagcttgtcgagatgcaccgcgccctcaccgagcaccaggacaccattgcaggagagctgcgtatcattgcattaagaagaaaagccgaatacaaatggcctgcgaggctgcaaccccgggcaaaggagtccgaagaggaaacccaaagaaaatataaagaaactactaaaaaagagaaggccaggtcacaaccactaactacaacttcctaagaatttcctgatccaagagcacgcaaaccagctgctccaacaaaacaccaaagattgcgctcatccataagggaccggagatttgcataaactttttttagctttcattaggtcattttttaaatattccgtattccaatgattcaccctaattacttacattgatggccgcacaacatcccacctgtccctttttagaataatctttaaaacagacttcactgaatttgcccttcctcctgtacaagtgttttaatgctcctttgtaatgtatgcattgtcgatggaatatagtcccttcttttttttcccgatcaactgggtttttgtttcttcttcaggaattaggtttagtaatctgtactgtgatcctcaaattatccctggaggccacaagatcacagcaaggcaacgatggcaaccaacaccaatgcagctgcagatcttggagaacatctttgaccaaggcaatggaacaccaagcaagcagaggataaaggagataacggcagagctctcgcaccatggccaaatctcggagacaaatgtgtacaactggttccagaacagacgggcacggtcaaagcggaagcaggccgcttctttaccgaacaatgctgaatctgaagctgaggtggacgaggagtctctcaccgataagaagccgaagtcagatcggtcgctccaggacaacaaggctatgggcgctcacaacgctgacaggatatctgggatgcatcacttggacactgatcatgaccaaatcggtggcatgatgtatggatgcaatgacaacggcttgagatcgtctggcagttctggccagatgtccttctacgggaacatcatgccgaatccaagaatcgatcatttcccggggaaggtggagagctcccggagcttctcccatctccaacacggggaaggctttgacatgtttggatgacatgatgcggcgctgagttgccgtgtaaaatgtgatggttgacacatcgtgcgttcaatttgctgacatgaaagttgatgttggatgtccgtgttgcttatcacgttctggttaaccacctccgcggatggtagctagcttgaatgaacctactctttgggatagctgtaagaggttgatattatagtttgccagtagtctatatacgctgaactatcagcatgtaattctccacgtttgcaaatttagcacgggtatgcagcagcctgtggttaaaccttcgtgtgtgtgaaaccatttcttgcttgcttttaagaaaaaaaaaaaaaaaaaaaaaaagcggcc

SEQ ID NO: 5112 - DNA, 2007 bp, Zea mays
ttcagttagatctgaagctcttgcacaaagtctcttccactagatgggcataaaggtggattaattaggacttataggctagaactcacaccacaactaactaataggtaggctcaatatgccgctggattaggacgctgatatgataacaataataaaaatggtttatagtggtttgaccgtgtaagcatgcataatactctacatcatctttatgatggatgggtaatgggttgatgaaaatggagatgaagattgcatgcttagatatggtatactggtatgaacattggaacatgcatgaggaccgatcgactagctccacctttatttttattccgttgagagttatcgtcatctaagtttttaagaagcgtaaaatctagcaaagctcggactaagagcatggatctgaagccagcgttcggaaccttcggaccctcttctacattgctttaaataatatgacaatatcatacagctaagctagcggtactggccatgtttgtgtgactgagccggccagctccgccaatcccgttggcttggctgcaactaacgaattggctataaatatcagcagctccgggcgccggtccggaaccaaagctagctactttgttgctgtttttattcgtttgtcacataagcagtggtggtcggtcggccggcgacaatgagcggccgtgtgttcgtcctggccgctgccttcggcgtgctgctcgccgcagccgccgtgtcctcgaggcccgtcctgactccgctgggtactagccgccctgctgccggcgacctgtccgtgtacttccacgcggactcgtgcccgcagctggagacgatcgtgcggtccagcgtggacgcggcgctccagcagaacgtccgtctgacggcgggtctcctccgcctcttgttccacgactgcttcccgcagggctgcgacgcgtccatcctcctggacaacggcgagcgcggcctcccgcccaacgtggggctgcagcaggaggccgtgcagctggtggaggacatccgcgggaaggtgcacgcggcgtgcgggcccaccgtgtcgtgcgccgacatcacggtgctggccacccgcgacgccgtgagcctgtccggcgggccttccttcacggtgccgctggggcggctggacagcgcggcgccggcgtccagcaacgacgtgttcacgctgccgccgccgacggcgacggtggacgagctgctgacggcgttcgggagcaagaacctgtcggacccggcggacctggtggcgctgtcgggcgcgcacacggtggggaaggcgcggtgcagctcgttcggcgacgtggcgggcccggccaccgacgacgtgacgcggtgcgtgacggcgacgtgctcggcccccgggagcggcgacacgctgcgggacctggacttcctgacgcccgccgtgttcgacaacctctacttcgtggagctgacgctgaggaagaacaagggggtgatgctgccgtcggaccaggggctggtgagcgacccgcgcacgagctggctcgtccagggcttcgccgacaaccactggtggttcttcgaccagttcaggacctccatgatcaagatgagccagctcaggggaccccaggggaacgtcggcgagatccgccgtaactgcttccgcccaaacaccaacggcatcgccgcctctgcttgagttgactgaccaggcaccgatccattacttcactttcactgtgtgtaataattaataataataaaacaaaaacaacgccagcccgtacgtgccgtgtgaggggggcacgtggttgtggctatactgtagccgtcaccaccatgtcggcgtcgtccatgcatgtcgcattaccgatttttgttcatgttccgatctcatctcatcatctcgctatcaataacaattataatagtgtttattagtagtacatcgcatcacatggcgactctgactctcaactatgatcacctactcaccagtttcttgtcccgtccccg

SEQ ID NO: 5113 - DNA, 3428 bp, Zea mays
aattcggcacgtgcgcaatatacggtgcgtgtgggggcggcggcgacgagggttttgctgctccgtacaccgcgtgcagcggcgacgcgaccgcagctggtcgccgccccggatcgaggagggggaggagccggcggaggctcctgtggtggctgcgggggcgggagcgggagcgccatgaggggcggtggccgtggcggcggcgggagacagccttcctacgcggcgccggatggggcggatgcggcggcgatcccggtcgcctcaaggaagatggtgcagagcctcaaggggatcctggccgaccgctcggagggcgagatctacgccacgctctgcgactgcggaatggaccccgacatagccgtcgagaggctcatctcccaggatacttttcatgaagtcagaagaaagcgggataggaaaaaggagactaaagttaatcacgaaacaaggcctcgacctttccagaaatatacataccgaggatataaggctgtttcagatcgaagtgggcgagaccctacaggcggtttcaaaggccctgtaaagaaggaaccagagttgcaagctccactaaactcatcagccttggatgtcaagacaagtgacactacagaaatattttctgctactatcaatgttgcccagactgatgctaagaacaccacttctcagcctttatctaaagtgcagcatggttggggtggtattccaggtcgcccttccatggctgaaatagtgaagatgggcaggcctcaagctaaagttgggagcagatctgttgcaagtagcactgcgttgccaaccgttggtgattcagtcatttccaatacaccaaatcttgtgcccgaggaatataacagaactgtttttgcatcagaagcaggccatgtcgcagcagataaattgccaaacggtgctgttgaggtgcactctctacctaaagatgcttccgcatttgatatgttaccttcagctgagggaacagatgttgaagccccttccatgagtgctagtgcacaaggttcatcaatgccagatgccaatgaagatgacattgaaaaatatgcaaatttggaagagggcaatacagaaagcttgatatctcctggacaagtttctgcttctggtaaagatatacaatcagaatatactgaagttgtcagccatgtggatgaaggctcgatagagaaaacagatgactttcagctcaatggccttccatttgagcacaaccaaaatctgaatggagatgtgtctacagcgacaacacaatttgatcatttgactctgcatgagggaccaaaattgtccgatgataatccggctgtaataattcctgatcatcttcaggtttcgaatgctgattgtgcacatttgacgtttggtagttttgtgtctggaacacttgattcatccttgacaacaaaacctcttgaaagtcatggggatgctgcgacagttcctgatgatgattcaattgaccaatcagatggcaggatccatgacgatgaaggcaaggtgacattagctactgatgttaatgaatatgttacttctgcggcaaacagcaacgaggagaatcttgatattacatcagtacagcaatctgaagtcactagagctgatttcttggatgtcacaagcaatactgaatacaacctaacatcaactccagattatgcaacttcaagtgcaccgttgcaggattctgcttcacagagtttacaggaaaaccgacaattccagaacatctctcctttctcaagcttcatgcaaatgcaaaatggtctcctgccaccagcaattccaccattgcgtgaatttgatccagcattttcactattgctcacccatcctcctatgatgcatggtacaatgtcatcatccatgagcaatacaactgtttctacacagccccaagagaatgccaatccagttggtttacccaaccctcaattgactcaatctcagcaaagcaccagcattgcttcagggcctccactccctcagcatcttcttcatccctatgctcaaccaacccttccacttggatacgcaagcatgattggctatccatctcttccaccaagctatgcatatctcccgcctgccgcttttcagcaaccatacatgaacagtggcttgttccaccaggcagcagccgcagttcccacctcaagtgtgaaataccctctaccgcagtacaaaagcaacattgcccttgctagcttaccacagccaggctctttgctctcaagctacgttgggggctttggaactgcaagcaacatgcctggaaatttccctctgaatcaaagcacagcagcagcaacaacaactcttgggtttgatgggacggtcccttcacatttcaaagatggaaatcaatttatttctcttcagcagaatgagaaccctgcaatgtggatgcatggtgctagttcacgagggatgcccccacttgcagccagtaccatgtatggctatcaagggcagagtcatcaggccggccttcggcagggccaactaccttcacaatttggctctgcgcttgggcagtcacagccaggcctgggccctgaacaccgaaaccctagcgatagtaacctaagtggcgctgctcaggctaaccaaatgtggccaaatacctactgatccatcccccttgtcgacttctgtggaaggcggtcctgttgtgtgtgcaacgccggtgaggccatgcagtgcttgtgttctgatccaggcacgcggataccagctgtgcctgtgcgcatgagtcgctgtcgtgacattttgaggcacaagagacatatgttcgagcatgctctacctgtagggtttctaggatatggcaaaagaaaatgtagctcgatctatttattcaaattctgatagagaaaggacttcctcttttctattttattctcttttgtcattcacatatcatgtgacaaataaaaccgaaatatctaacagcagcgccattagttcccgaggaagtgaaactttacatcacacgtcttgcgtgcctcttggcttcaattttatgattgaggtgattaattgatggatgagcatttcccactcagtgctttgtcaagagaggatgccagattgatcgttgttttgaacatgaacctgtccttgatcaattagtagctagctaggctatgataggcgaggctactctgtccagagccttttaatgttggaggtcagagcgtgacgtacgcgttcttgcagccgcgtgttgacgaatcgtaaaggagtggagtggttgagatcaggggtgcagtctagtttcattgcaaaatggcatgcaagaacaaagaatatcatcatctgtactgtacacatctgcctgctaacaagggcaacgctactgaatgccagtgccagagacacgacgttactggtcgcaa

SEQ ID NO: 5114 - DNA, 2384 bp, Zea mays
catatatatagattaaattattttaaactaaaagaattatatattatggtagttcaagtcatgatgaatctagtaactttacttttatattataaaatcttatgaaatattcgttataacgggttaaagttaatagtggttaacttaaaacaaacccaaaacgactaaatcacgtggacgaaaaaataagacataatattttttaggtttttaagaaaaaaaattattttttttagaaaaataaaatttacttaaaaatagagttatcaaattagttttttaagtcagagaaacaaggtaggagcaggacgatgcgaatagccttaccgacgcgtcctagtccaacactgaccaggccaaatgaagccaccgcaccgccacagccacgacgcgtaggccccgccacaccacccgagcgacttgccttgggcacctcgaggccggccggggattcctccactccggccttgcccgccgatctccagctgtcctccaatcaaattatcaacccaacgccatttcggcgctcccccatctcacagctcaacaaatccctacccaaatccacctccccgccccccaccgctatggctcacccaccaacctcgcgccgcttcgccctcgctctcatcctcatcggcgccctctgcaccgccgtcgccgccgcgcggttcgccccggcggacaaccacctccttgcgtgcggcgcggcggcgcccgccgtcctccccgacggccgccgcttcgtgccggactctggctgcgcatccacccgcctccggtcatcctccccgtccctctcctccgcggcgccgcccggctccccgccgccgccgtcctcgctcctcgcctccgctcgggtcttctcctgccgcgcgtcctacgacctcgatgtccgccgccgcgggcaccacatcctccgcctccatttctaccccttcgtccccgccctcgccgcgtcccgcttccacgtcggcgccggggggctcctcctcctccacaacttcacggcctcgtcccccgtcgtcaaggagttcatcctccccgtggactccgacgtcctcgtgctcaccttcgtccccgactccggctccactgccttcgtcaacgccatcgagctcgtctctgcgcccgaagagctcgttggcgacatcggcaccctagtcacgtccggcggcgccgctcagatacacgggctgtcgtctcaggtgtttgagactctctacaggatcaacgtcgcggggcgcaaggtcacgccattcaacgacacactgtggcggacatgggttaacgatgagaaattcctcatcgacaccgactcctccaactacatggtgtggtcgtccagtggccggattgcttatcccaagggtagcaagcagatgacaagagaagtggctcctgacaatgtctacaactctgcaagatccgtgaggccaggggtgaatgtgacttggggtttccctgtgcctgctagcagccggtaccttgtgcgtatgcacttctgtgacattgctagcaaggctctgtatgagctctacttcaatatctacgtcaatggtgatcttgcagtcaaggatttcgatctctccagtgcaactggattcttggcctatccttattacattgactttatcgtcgatgtgaaggatgaggggatactgaaattggcgattggtggcttaaagaagagtcgatctgatgaagtaagtggtatccttaatgcactggagataatgaggatgaacaagaccagtggaggtatggatggagacttcccaattgatctacacatggaatatgtggtgagtaaggggattggagaatttgcccgctccctgctctgtggtttcatctttgttgggttgtttgtggctttggtcacgctgatggtgaggttgaggaccgagttgaggaataacggcacagcttggtcctggagacagatgaactccgatgaagggaaactggccagaacatatcagcttgtgcccagtaagacggactattgaatattgcaggctgggcatctttgaggagtgacaacctgcggctgttgtgtgcatctaatcacatcatactttttattaagttgtaagtattgtagttttatcacctctctaaaagtattgtagttttgtatcatcactcctttcatgcttggactttgcattctccatgctttgccaatggtcaatggaggacatgctcatgatgctgtaaaagtactctaccctagatgtggctgtattgctattgcctcatttattcagtttgacttctgaaacatggattcacagctgaattgcatttgaatataattagttgtagtggagacatttgattataaaagaaaaaaaaaaaaaaaaaagcggccagcggcc

SEQ ID NO: 5115 - DNA, 903 bp, Zea mays
  misc_feature (121)..(121): n is a, c, g, or t
cccagcgtccggcccaccgtcggggggacgttcttcagtttgtgttgaacttgtgcctcagaaggcctgtgcatccttggagcccaactaccagcctccagttacttttgtcgtggtgcangaaacgacatcacactaggctgtttgctaataaccacaacgatcagcgtacagttgatagaagcggaaacatactgcctggcaccgtggttgattcgaagatttgccatcctactgaatttgatttctacctgtgtagccatgctggcattcagggaacaagccgccctgctcattaccatgtcctgtgggacgagaacaagttcacagctgatgagctgcagactctgacaaacaacctatgctacacgtacgctaggtgcacccgctccgtgtcaattgtgcccccggcatactatgctcatctggcagccttccgagctcgcttctacatggagccagatacctctgacagtggctcaatggccagtggtgcccgtggccctccaccaggtgcggcacgcagcatgagaggagcggggagtgttgcggtcaggcccctacctgctctcaaggaaaacgtgaagcgtgtcatgttttactgctgagatgctgagctaccttcaccaagaaaatatcctgacttgttccatgtacccgcactgtttcggtgatactatctgacaccgaatttatgcattaagtcttccagtggtctggagattttaagtaacgcctgtttttattcgtgagttgtaacgctgcagttcgaggagcttcagtgctgtatgatgtgtaaactatttgttgtaagttgtaaccaattgttgtaagttgtaaccagccactatgttatgatcctgtttgtttcagctttttacaaattttaaaaaaaaaaaaaaa

SEQ ID NO: 5116 - DNA, 2210 bp, Zea mays
catcgcgtgccccgccgccgcccgccgtcccgagacccgattccccgtcccagagacgagagacggcacaacccttgctgccgtcctggtcgccacacggccacaccaacccaacacctcttcttcctccgctctcagcttaccccaccacaggcgagggaggcgactccttcctcgcggctacccgctccggccccgatcgcatctcctttgcacgccacggcccgcgcgcagtgtccaccggcacggccgtcctccgtgtgtgggggcgcatctggtgctagcttgccgggctagggtttggcttggcctcgtctaccgccccgtctcgtctgataggcacaggttccgtgcacgcgatcgtcgtctctccatccgttgtgactgcttgccgtcccccgcttgcttcgtcctgctacgggagggccactgctgccatcgcgtccaccgacgaatttccccacagagcattagagcaattatcttggagttgcagatctgtacctgaagattcatattgaaatctggaagcttctgctgttgagtacagagaaatatttcttgccttttgaggaagactgcagagcccctaaatgtgaaacttgtttcttttcttgtctactcctgaatgctgacgaactcagcctctcacgttacttagctgaaggtcgtactggtacagacaccgaggatggagcaagcaacaggtgtaagtggtcctgaacacataattgatattccaagggaaattggtcctcctgcttcggtttctcgtagtgctggtagagagaaccatgaagaatcgaatcctgtggacaggccttcaacaagagctctagtacctgccttgcaggcaccatcagcaataggtgctgtacctattacagggcatacttcaggcactaggagaaatgacaactatgttcgtcggcacagaagcccattgaattctggactgtggatttcaattgaagttattgttaactttagccagattgttgctgccattgttgttctttgtgtgtcaagaaaggaacacccacaagctccattacttgagtgggtcataggttacactgttggttgttttgcaacgttaccccatctctattggcgctatatacaccgtaatattgtaaatggtgagcatgagtcatcacatacacctcaagggtccgctcataacaactcaaatgaagcgactcatgctgcaagtgcatcagaacgccgcagaaatgctgcccgaaatgctgtgcttgctaatcctaggatcaatgcgctgtttgaccacttcaagatggccctggattgtttctttgccgtctggtttgttgttggaaacgtgtggatatttggtggccgttcttctgctgctgatgcaccgaacttgtacaggttgtgcattgtgttcctcacttttagttgcattgggtatgccatgccattcatcctatgtgcaatgatatgctgttgccttccctgcattatatctgttatgggttttagagaagatacaaacaatacaaggggtgcttcctcagaatctatcaatgctttgcctacatataaattcaaaatcaagaaacgtcgccatggttcaggcagtgaaactgaaggccaggaaggagggatattggctgcaggaactgacaaggagcgatcactctctgctgaagacgcagtttgctgcatctgtcttgcaaaatatgcgcacaatgatgagctccgtgaacttccatgtgcacactgtttccacaaggactgtgttgataaatggctcaagataaatgcactttgccctctgtgcaaatctgagatagtgagctcgtctggtacttctgatgcccgccaatcagaccagaacaccgttcctgtgcaggagatcgaaatgcattaggttggtctgttcccgcagcttatcacataaggatacatctgatttgtggctctcaatcttcatgtataaagttggagattgatgtatggattgtagagacgcgtaggtttttttttgtatttaacactgctatcttggagaagttacagctattctcgctgtcacccaactatggcaagccaatactacccaggttttcccccatagcgtgggctgcaccttatgttctgctcttgatggcattgaaaaaaaaaaaaaaaaaaaaaaaaaaaaaaaaaaaaaaaaaaaaaaaaaaaaaaaaaaaaaaaaaaag

SEQ ID NO: 5117 - DNA, 2358 bp, Zea mays
  misc_feature (2352)..(2353): n is a, c, g, or t
  misc_feature (2355)..(2357): n is a, c, g, or t
agagggtcctgcgttcccttcttctgctgcggcggcggaggctctttcagttccatccatcttctccctcgtggctctccttcctctctcccgtagtcccgccgaccccccgcgccggccaaggaaatcaagcgaagggccgcagaacgccagattttgattgttccacatcttctttcatctctgaggggtttcccgtcttcctcgcctgctctaatggctaaagaacaggatggatcccccaaggtgcgccacccagaattccaaaggatgcgcgtaactctcaccataggtgtcattggcctctgtgtcacagcatacattcttggtgcttggcaaggtacctcgaacggcattagttcccccttaataagtaccagaacccagtgcaaagatcccgtgcgatcatctggtgctcgcctggatttccaagcccaccaccaggtgggcttcaatgaatcggcgcttgctgtggagaaattcccaccttgccagctcaagtacagtgagtataccccttgccaagatccaaggaaagctaggaagttcccaaagaaaatgatgcagtacagggagcggcactgcccaaagaaagaagacatgctccggtgcttgatccctgcgcctccaaactatagcaaccccttccagtggccaaaaagtcgcgactatgcttggttcaataacattcctcatcgggagctcagtattgagaaggctgttcagaactggattcatgtcgagggagacctgcttagattccctggaggtggcactatgttcccacatggtgccgatgcctatattgatgacataaatgcccctgtacccattaattgaaggcaacatccgaactgcgcttgatactggatgtggagttgcaagctggggtgcttatcttatccctcgcgtccgcatcaccatgtcttttgcgccaagggattcacatgaggcacaggtacagtttgcattagagcggggggtaccagccatgattggagtgatggggactgagagaatcccatatccggctagagcatttgacatggcacactgctcgagatgtttgatcccatggaataagcttgatggtgtctatctaattgaagtagacagggttcttaggcctgggggctactggatcctctctgggcctccaatccattggaagaggcactaccagggctgggagaggacagaaggagacctgaagcaagagcaagatgagattgaggacttggcgaaacggctctgctggaagaaggtcgtagagaaaggtgatcttgctatatggcagaaatctatcaaccacgtagaatgtgttgacagtaggaaggtttatgatgctccgcagatttgtaagagcaatgatgtggattctgcttggtacaagaaaatggacacttgcatatctcctctcccagatgtgaagagtgaagatgaagttgctggcggagtccttgagacatggcccaaaagagcatttgctgtccccccaagagtaatccgcggttcagttccaggcctcacccctgagaagttccaagaggataacaaggtgtggtcagagagagtggatcactacaagaaattgattccaccactgggcaaaagacgatacaggaatgtgatggacatgaatgcggggataggtggctttgcagctgcattgatgaagtaccctctttgggtgatgaatgttgtgccttcaggcttggcccatgacaccctgggtgttatttacgaacgagggtttattggcacgtaccatgattggtgtgaggctttctcaacgtacccgaggacctacgacctcatccatgctgataaagttttcagcagttaccaggacaggtgtgacataacgtacatcctactggagatggaccgaattctaaggcctgaggggactgtgatcatcagggacaacgtagaggtgttggtgaaggtacaagctatcactggaggcatgaggtggaagagccaaatcatggaccatgagtccggtccattcaaccctgacaagatcctagtggctgtcaagacttactggaccgggaagctcgtgcaaaaacaataatcgtcgccttgttactgtttttcgtctgcgaaaatgtaggcatgacttgcctgtcagttctgtcttcattgccatttttttatcctaacttcaggatatctgtatataggaggcatgtgaaccatgtagctggaattggtatcaaacatcattagccacgtagcgtatgtgacacattgcaatggtgtataaaatgttcactcatatatttggtgtgatattgcaatctaataacatgatgcttggtgtgaaaaaaaaaaaaaaaaaaaaannannna

SEQ ID NO: 5118 - DNA, 2416 bp, Zea mays
cgaccgcgcgctgtggcaggcccccgccgcggccgccgggatcttcgcggacaaggtgctggaggtgatcaacccggacgacgacttcgtgtgggtgcacgactaccacctcatggtgctccccaccttcctgcgcaagcgcttcaaccgcatcaagctcggcttcttcctgcactcgccgttcccctcgtccgagatctacaagacgctccccgtgcgcgaggagcttctgcgcgccctgctcaactccgacctcatcggcttccacaccttcgactacgcgcgccacttcctctcctgctgcggccggatgctcgggctctcgtacgagtccaagcgggggcacatttgcctcgagtactacggccgtacggtgagcatcaagatcctgcctgtgggggtgcacatggagcagctcaagacggtgctcgggttgccggagaccgaggccaaggtgtccgagctgatggagatgtactctggaaaggggagagtggtcatgctgggcgtcgacgacatggacatcttcaaggggatcagcctcaagctgcttgccatggaggagctgctgcggcagcaccccgagtggcgggggaagctggtgctggtgcaggtcgccaacccggcgcgagggagggggaaggacgtcgccgaggtgcagaccgagacgtacgccatggtgcggcgcatcaacgaggcgtacggtgagccggggtacgagccggtggtcctgatcgatgagcctctgcagttctacgagcgcgtggcctactacgtcatagccgaggtgtgcctggtgaccgcggtcagggacggcatgaacctgattccctatgagtacatcgtctcccggcaggggaacgagaagctggacaggatgctgcggcaggggaagccagaggagaagaagagcatgctggtggtgtccgagttcatcgggtgctcgccgtctctgagcggcgccatcagggtgaacccgtggaacatcgaggccgtggctgacgccatggagaccgcccttgtgctgcctgagaacgagaagaggctgcgccacgataagcacttccgctacgtgagcacccacgacgtcgggtactgggctaacagcttcctcctggaccttgagaggacctgcaagtatcattctcagaagaggtgctggggcattggcttcggcctgcggttcagagtggtctcgctcgacctgaccttcaggaagctttccttggagaacatccttatggcataccggagagccaagacacgggcaattctgctggactacgatggcacgctgatgccacaggcgattaacaagagcccgtccactgaatctgtgcggatcctgaacagcttgtgccgagacaaggacaatgtggtgtacctatgcagcgggtatgaccggcgcacccttcatgagtggttcccttgtgagaaccttggcatagccgcggagcatggctacttcctgaggtgtaagagggacgcggaatggaagacctgtgtcgctgccacagactgcagctggaagcagatcgcggagccggtgatgtgcctgtacagggagacgacggacggctcaaccatcgaggacagggagacggtgctcgtgtggaactacgaggacgcggaccccgacttcgggtcgtgccaggccaaggagctcgtcgaccaccttgagagcgtgctcgcgaacgagcctgtgtcggtgaagaccacgcctcactcagttgaagtgaaaccgcagggcgtgagcaagggcttggtggctcggcgcatgcttgtgtcgatgaaggagcggggccagtgcccggacttcgtcctgtgcatcggcgacgacaagtccgacgaggacatgttccagctgatcgccaccgctgcctgcggggactcgctggcgtccaaggcggaggtgttcgcgtgcaccgtcggccgcaagcccagcaaggccaagtactacctcgacgacgcggcggaggtggtgaggctgatgcaggggctctcctacgtctccgaggagctggcgctggcgaaccagcgggatgaagacgaggactcctctctggacgacgtgtgggaataggaaggagcgttcccttcccgtgctgctcctgcggtaatgtctgtttgtgttgttggctcggctggagctttcgccgagtagtttaggtgtgtaaatgaggtatgcttttcagcgtaatgtattgccagtggtctagtctcgagagctggcttgaatctagtgatgctctagtactttggtttgtggtgctatttacctgatccgtggaaggcagtactatgagctatacaagatgcagacctgaaatctcattcatctgaagaccatgacctttctcctaggcgtgtgtatacgtctttggattttggaactaaaaaaaaaaaaaaaaaaaaa

SEQ ID NO: 5119 - DNA, 1784 bp, Zea mays
ctcgaggccggccgggctccccgtcccgtccaccgattcccctccctaccgcccggcccgccgccaccagacgagagacgacctcccccctcccccgcattctctcacgccgcctgcgctctccccctcgcgagatagacaaccctagctcccgtctccttgcttaccctcctctccaacccctctccgatctctataaaagacccgaatttcgaattccccctcgaacccgcgatccgcgctttccttcccgcccatttcggtctctgattcggcgcggattcgctgcgcgggagcccccgaggttgcgtgcgtgattcggatggcggagccggggctcgagggcagccagccggtggatctgtccaagcacccctctggcatcgtccccacgctccagaatatcgtatcaacagttaatttggattgtaaacttgacctcaaagcaatagctttgcaagcacgaaatgcggagtataacccaaagcgttttgctgcagtcatcatgagaataagagaacccaaaaccacggcactgatatttgcatcgggtaaaatggtatgtactggagcgaagagtgaacagcaatccaagcttgcagcaaggaagtatgcccgcattattcagaaacttggttttccagctaagtttaaggattttaagattcagaatattgttggctcttgtgatgtcaagtttccaattaggcttgagggccttgcatattctcatggtgccttctcaagttacgaacccgaactctttcctggccttatctatcggatgaaacaaccaaagattgttcttttaatttttgtttcaggcaagattgttttgactggagcaaaggtgagagaggagacctacactgccttcgaaaacatctatcctgtactgtcagagtttagaaaaattcagcaatgatgacatgtgatgtgaaggtcacgttcttcaaattacaagcttcctcgaggattctcgtgtgaccatgaattctaaatgtacataaaagtctggcggaacttatagcatcctgtaatctctgtgagccgcggtctgtcagtattgggtgggcttgctgtggtaactggtggacatgtcgagttcatccatttgggtaggccttggtgaacacggacgccccacatcatgtctcagtttgagtagtttgtgtgaactgaagggtacgtgcttctcccatgtggttgcagcgttaacttgagtcaagtgctaacaagagtagataaaattttgccccagttcgtctttgtgacagtcttttaaagtcttttttctgagtatctttcaaagtgttttcagagtatcttccagtgtgctactgctgtgcgatgatgagaaggctggcactgtatgtaacgggggcaacgtgaccggttgtaagttatgtattgtagttgagatgctgtagcgcctagggcactgggattgaacttgtggaggaaccagtcagtcgaccgttctatttgtgtggccctctgctactgactaatgtggcctgttccaaatgtcgctgcgattttcgtttcttttaccatgttgatgttgcatgctaaggtgcaagggtgaagaatttggatgccaccagagatgcgtgtccgggaaagaaatgctcagcgaacatgatgttcctgggctcatggcgcagccacatgcctgcctcgctcgaaaacactttcgtatgcaatgaaatcgacgttgacgagttcctgggttgcgcatttctatcctgcagctgcaggcaggctctagaggggtccccggg

SEQ ID NO: 5120 - DNA, 2484 bp, Zea mays
  misc_feature (737)..(737): n is a, c, g, or t
agtctggctgcatgagccaggactgcgggaatctggctccagggatacgaccaatttgctcgcgtctatagagcctggtctagagtgctttaagtaccgtgcgagtctggtttcactctatacgtaggtaaccaaacatacacctcgcacgcgtagagcctggttaacaacaaccaaacaccagctcattacatcccatcatgtaagcaccagcaaatacatgcagccaaacacatagttaagggttgtttggttctatatctatggtgccaaaacttgccacgcaattttacgccacacttgactaatgtgactaaggttaggcgttcaaattctacgccacaatttgccatgtctaaaagaatcttgccatacttttaccagtcattgacgagtaagatctatgtagcaggaaaaaaatgttgctacaactatggtttcaaaccaaacacatgaccaatttgatcaaatttggctaaatttagatgtgacaaatcgtggcaagttagacagtaaattaaacaatccttagtttgttagatcatgatctaatttgtagacatgaccgtgatttactagagagtttccataaatctacacgaggtagtcaaatagacttttgtggatatttgtatgcatactttttgtagagcgttgctatacatgactttattgatagactcaaatacaagtaaggccgtctagtagtctatgatttattagtttaaaataagganaacaacaacaacggtagattaacgttgttcgtacactcatactccattcgtatggatgagtggtacacgaaggacttctctttttttaagttacatgaacttttccttccaagtaaaaaatcggcagaaaccattgtcgcatccacatccccgtcactcccgcccgccaaatccattgatgacaaagcggccgagtcgcacactccaatgaagggaagctttggttggttgactgctccatccacccaccccctacagttcagttcagttcagttggtctaggccatggccatgtccgcttcctcctcctcgcgcgccctcctccgccggatcggcggcgcgctcctccgccgctccttctcctcctcatccgccgcctccgcagggtaccacgtcgcgggcgggcccagctacatgcgcggcgccgtcttctgggagcccggccgcccgctcacgctcgaggagttccgcatgccgcggcccaaggccggcgagctcctcatcaagaccaaagcctgcggggtctgtcactccgatctccatgtcctcaaaggcgagctccctttctccacgccctgtgtcgtgggccatgagatcactggagaggtggttgaccatggcacgcacactcctgttgagatcatcaacaggttcccagtcggaagtcacgtcgtcggcgccttcataatgccatgtgggaactgcttctactgcgttaagggccaagaagatctgtgtgagtctttcttcgcgtataatcgtgccaaggggacactctatgatggcgagacacggctgtttctaaggggcaatgggaaaccggtgtacatgtatagtatgggagggcttgcagagtattgtgttgtcccagccaatgcgctagcagttctccctgactcactgccatacacagaatcagcaattttaggatgtgcagtgtttaccgcgtatggtgccctgaggcatgctgctgaaatgcggcctggtgattcagtagctgtgatcggagttggaggggttgggtcaagctgtttacagatagcaaaagcctttggagcttcccaagtcattgcagtggatgtccttgatgagaagcttcagaacgctacaacacttggagcaacccacactgtaaatgcagcaaaagatgatgcagttgaaaggataaaggaaattactgatggtaggggtgtagatgtggctatagaggcacttggtaaggcgttaacattttcccagtgcgccaagagcgtgcgtgatggaggcaaagctgttatgatcgggcttgctgcaacgaacgtaatgggagaggttgatataacccgtcttgtccgacgacaggtgaaaatcattggctcatatggcgcaagggccaggcaagaccttcctcagatagtgaagctcgcggagagtggtgccttcaatctccaaaacaccatatcaaggaaatgcaaatttgaggaggcgaatggcgcctatgaggatctcaatcagggcaagatcgtaggacgagctgtggttgagatcatggagtgatgacggacaaggtaatcaatcctgtggttccaagtctgggtcacacaacaataaagttttgcgtgctctttcacagcattgtcaaaatctgtagatgaccaaactgcattgtgtgtgtgtgtgtgtgtgtgtgtgacagtgtgttgttggaattaacatttgcccttaaaaaaaaaaaaaaaacgcccccgtgctcagctttgaaaaacaa

SEQ ID NO: 5121 - DNA, 3283 bp, Zea mays
aattcggcacgagggcctgcctcccctcacgagctccctcctctcccgctccaccaccggcggctcctccgcccgcggcgtggcggtggccgcagcgatctccaggcccgccgcggacgccgccccttcctcctcgtccccgcctgcccgtccgaccccgaggccgcgcccaagcccggcgtcgcccttcgcgtccggcctcgcgggccgcctcttcggcggccaccgcgccgccacccgctccgcgtcgtctgcggccgccgtcttcgagcgccggtttgcctcagccgcgaccaggaactcgtacgatgaaatactgacgggcctcgggaggccaggaggcggagaggagtttggcaagtactacagcctgcctgctctctccgatccgcggattgatcggctcccatattctatcaggattcttctcgagtcggcgatcaggaactgcgatgatttccaggtcaccgggaaggatgttgagaagatcttggactgggagagaagtgcaccgaagcaagttgaaatcccgttcaagcccgcccgtgtcctcctccaggattttactggtgtcccggctgttgtcgaccttgcgtgcatgagggatgctatgagcaaactcggcagcgacccgaacaaaattaatcctctggtacctgtagaccttgttattgaccattcagtacaagtcgacgtggcaagatcagcaaatgctgctcaggcaaatatggagcttgagttctatcgtaacaaggaacggtttgggttcttgaaatgggggtcctctgcattccgcaacatgcttgttgttccacctggatctggcattgttcaccaggtgaatcttgaatatctggcaagggttgtgtttaataatggtgggatcctttaccctgacagcgtcgtaggcactgactcccacacaactatgatagatggtcttggagttgctgggtggggagttggtggtatagaggcggaagctgcaatgcttggccagccaatgagcatggtcttgccaggggttgttggcttcaagttatcaggcaagctgaggaatggagttacagccactgacttggttctaacagtaacccaaatgcttcggaaacatggtgttgtcgggaaatttgttgagttctatgggcaaggcatgagtgaattgtcacttgctgatcgggcgaccatcgcaaatatgtctcccgaatatggcgcaactatgggtttcttcccagttgatggaaagacgctggactatttgaagcttactggccgaagtgatgatacagtggccatggttgagtcctacctgcgtgcgaataagatgttcgttgatcacagccaggctgaagctgaaagagtatattcttcttatctagaactgaacctggaagaggtagaaccatgtctatcgggaccaaaacggcctcacgatcgagtgacattgaagaatatgaagtctgactggctttcttgcttggatagcgatgtaggattcaagggttttgctgtccccaaagagtcacaaggcaaagttgcagaatttttgttccacgggactcctgcaaagataaagcatggtgatgttgtaattgcagcaataaccagttgcacaaacacatcaaatcctaatgtaatgctgggagctgctttggttgccaagaaggcttgtgagttaggcctggaggtaaagccatggattaagacgagccttgcacctggttctggtgttgtgaagcagtacttggataagagcgggttgcagaaatatcttgaccagcttggcttcaatattgttggctatggttgcacaacctgcattggaaattccggggagcttgatgaatccgtatctgctgcaattactgagaatgatattgttgctgctgctgtattgtccggaaacaggaattttgaaggacgtgtgcatcccttaactagagcaaattaccttgcttcccctccattagttgttgcttatgccttggctggcacggttaatattgattttgagaaagaacctattggcatctcgaaagatgggaaagaggtttacttccgggatgtttggccatcaacagaagagattgccgaggttgtcaagtcaagtgtgcttcctgagatgttcaagagcacatatgagtccatcacccaaggaaatcctatgtggaatgagctgccagtctcaacaagcactctctatccctgggatccatcatctacatacatccatgagcctccttacttcaaggatatgacaatgactcctcctggcccgcgaccagtgaaggatgcatattgccttctgaactttggtgacagtatcacaactgatcacatctcgcctgccggaaacattcacccagacagcgcagctgcaacatatctgaaggagcgtggtgttgaaaggaaggacttcaactcatatggtagccgaagaggaaatgatgagatcatggctaggggaacctttgccaacattcgtctcgtgaataagttcttgaagggtgaggttggacccaagacaatccatgttccatccggggataagctttcagtttttgatgctgctatgaaatacaagaatgaagggcatgatactattatcctagctggtgccgagttacgggagtggtagctctcgggattgggctgcaaagggcccaatgcttcagggagtgaaggctgtgatagcaaagagctttgagaggattcaccgcagcaatcttgctggcatgggaatcatccctctatgcttcaaagcaggggaggatgcagacaccctgggcctaaccggccatgagcgctacacggtccaccttccaaccaatgtgagtgagataaagcctggccaagatgttaccgtgacaactgataatgggaagtcgttcacttgcacactcagattcgacactgaggtggagcttgcttactacgaccatggtggcattctaccatatgtcatcagaaagattgcggaacagtagattgagatgattgcgatgcggtgaatcgtaattggtgtaaacgacccatttttgagtacttataataacctctgagtttctcagagtgagctgtctgaacttttagtaaccttttgctttctttaagacactgttaataatatgttaactcctgcaatatctgaatatacatttggcagatgattccctaaaaaaaaaaaaaaaatagttcataacactgacgcagttcaaagcggttcttgttatctggtggtactcaaattagtactgcaaaaaaaaaaaaaaaaaaaaaaaaa

SEQ ID NO: 5122 - DNA, 2607 bp, Zea mays
caggaaaaaaacccggtgttctagccgcacgcatctcaaaggtgatactgggcggggcgatttggagatgatgttctagcactagcagcacgcacgcatctcaaaggtgatactgggcggggcgatttggagatgatgttctagcactagcagcacgcacgcatctcaaggtcatactgggcggggcgatttgcgagtcctgtggcctcgtgggccacgtgcacgcagcagaccgcaggaatttgcacgagaccagtacctagaacaccctactccagcgaaatccgccacttcgtcgtcgtcgtcgcacggattggcattggctgccccccggccctgttcctcgtcctcctcatcaattcccgtctctcagtcctcccaataatggtggcgtggtgagaaatccttccgtccggccgtcgtcttagaagatgaactgttcctcttgctgcgccgctgccactccatcttctccggcgcttctcgccaggccgcgggggggtttagctgctagctgctccacgacgacagcaaatcagaaggtgcttttcctgggctcaaaacagtttccacggatcacgtatagccgtgcgtcgtcacggttgtcgcggagagaggtaatagcttttgccgggcaacaaccttgggacatcggcagatttgtcaagacgctgtatttcttcaacgggcctccaaaccttctcaagattgtagaatctatcatcagcagtttcactggacctgcttctagtgaagtgccaaagaaaatggaaacgtcggatgtggtgctggttactggagccaccggtggtgttgggcgacgggtggtggacgtcctgcagaagaagggagtacctgttcgagtattggctagaaatgtagacaaggcaaggagcatgttggggccggatgtacctctgatcataggagatgttacgaaggaagatacacttgatcctaagctattcaaagggataaaaaaagtagtcaatgcagtctctgtcatagtggggccaaaggaaggtgatacgccagacaggcagaagtacaaacaaggcatcaaatttttcgaacctgagatcaagggaccttcacctgaaatggttgagtacatcggaatgcaaaacttgattaatgccataaagagtagtgttggactgagtgaagggaaactgctatttggtttcaaaggcaacttatctggagagattgtgtggggagctcttgatgacgttgtgatgggtggtgttagtgaaagtacattccaaatcttgccaacaggaagtgaaagtagtggaccaactgggttgttcaaagggactgtatctacttcaaataatggtgggtttactagtataaggacaaagaattttactgtgccagaggacctgtcagcatatgatggtattgagttacgagttaatggtgatgggcgacggtataaactcattatacggactagctatgaatgggatactgttggctatacagcaagttttaacacaactaaggggggatggcaaagtgttaaagtacctttctcttctctgaaacctgtattccgtgctcgtactgtgactgatgctccacccttcgatgcaagcaacattacttcactacaactcatgtttagcaaatttgaatacgatggaatactcaacccaacatttactgaaggtccgtttgagcttcctttttcgagtattagagcatacatcaatgagccgatcactccaaggttcgttcatgtgagttctgcgggagttacaagacctgaaagaccggggttagatttaagcaagcagccacctgctgttcgattgaacaaagagcttggctccattttaacttttaagttgaagggagaggatttaattcgggaaagcggtattccgtacactattgtaaggccatgtgcattaactgaggaaccagctggagccgatctcatgtttgaccagggggacaacatcacaggaaagatatcaagggaagaagttgcccgtatttgtgtagcagctctggcaagcccagatgctgtgggcaaaactttcgaggtcaagagcactgttccattcagcgaaccgtatgtgattgaccctgcaaatcctcctcctgaaaaggactatgaagtatatttcaaagaactcaaagaaggcatcacgggtaaagaggcgttagaggcaacacctgctcaagtttgaagatgtcgttgaattaagaatttcgtctgttttcgtaaattctgacacagtaacccccactctgaatgtctaaagtcatctagaaacatagatgacactaatgctaaattttgtagctgaagatcagaccaataaatattcccaagaacacattactgttaggttgggggatcattaaactcgagctaagacacaaatatgtagatgaaattagtgctgctgttcatgccttcgttggagttagccattacaggacacaagaatttagtaagaggtttggcaaaaaaaaaaaaaaaaaggagcagctgcctgatgagttggtagagtggttgctttcagtcaattctctagggtgcctatctctatttaacttgatgctgcacactgggggctcccttcagtc

SEQ ID NO: 5123 - DNA, 5291 bp, Zea mays
ctcgtaattgcttactagtagtattgtttatgctttagctgtgtgactggagctattcaactctcactcacccatgtcatcccgaggacctgcgttctgtcagttgaacatacatgtcgcaattttttcggtgctcaaatgtttcggtgctactacggttgggccccgtgtgctcatggattacctgtcagatccatcgtacgttaggcaacttaataagctcttcctctgtcgtgcaccctcatcgttcttgaatggcagctaaaacgtcgtttcggagttagctttattgctcagtgattattggttatgcttgctagcctgacggaagacatgtgcgtgccaacccctacgccacgcctttttttttcttcgtttctggaaggaagtctcattcttggctgctgcatttccttttcctttcctttttcttttttgttgttgctgaaatggttgtaaccttgggcctgggggcgttgcgctgttctcctcagcctccagctcgtaacggccaaacagacatgacgtgccagagacctaacgctgatggtgactgactgctacggtggttctttcacatgaactgccaccatattatacctgtaggtcttctctaatgcatgcggcagttccggtcggcgtgtgcccgcgtcttttgccttcgatgtgcgagtgctatcgattttttttttgacagacgtgacctggctgttcatgtgaaaggtactcccagcccaagctgttgtgttgtgtcctccctaagcaacgtgaccctctcctttaatttcttgctgatgcaaactgcgatggttttcgctccttgtttactccaacttttttttttgttttcctcaggtattcggacggcgggtgctgctcttgtccccactccacccccctctttttttttttctaccaaacgtgctttttgcttgttaagcaaccgcggcctattccctcgagatcttaatgagcggagcggatcagcggagggtgtgtgatcgtgaagccatgccgctccttttccttttgctggagcggtggccgccgatcgagtaaggcgtcgcggtcgcggcggcaggttggaggcagcgtttgcgttgatgcctgatggcaggctggctggaccagtggagaaaataataataattaaaaaaaggacgcatctgtccctcgcagcacctgatctgtctacatttctacaacagacaacacaaccacggaaggggcgtgctgcatccatggccatgcatgatccatgcatggtgtgtgatgtgatggagaccgtgggactcatgccgtctgcgctcacagcctccggactgggcaacgacgatacgataccatcaaattcgttggcagccccactgataccacgtgattaaccagctaaatttaatcattccaacgtgtacatttctgctctaatacggtgactatctccagtagactccctgtcctactatacaaacagtataatctccagtgctacgcgtaccggagatggatggcctgtatagtctaccgtctcctactctcctaccaaaacataagtctcaccaaaaaaaaaaaaggaccaaccgacggatctgcaaagcaaacacggtcccgtcctgaatggccccacgtcctggatgattctcctggtagtacgctggttaggctccccaccaacacgccgacgaaggccgaacccccgccttggtcaaacgaaccacgtggtgggctagagagtggagacccaataggaagcacggatcccaaacgtggaccagcgaccgacgcacgcaccgacgaaaaatggcccacgacctaacgaaactatttacacaaatctcccaaaatgtatcgaccgaggcagcagtagtatcgtcaccaaggaagagggccgaagggcggaggaaggcgggtataaaatttggcgggttctcggttccgccggcgaagcgtttacttcttcggccgcgatctcgaggagggagggagcgagcgagcgggaagaaagaggggggcgcgcgcgcgcccatgttttgacctcgcccggcgtcgtctcggcagcgatctagatctgaggtcagttccctcccctcccctgatctccgcgctcgtcactccttaacccactcctcggccacagatccaggcgtgtctgtcactagggcttgggatttcatttcttcatccgttggtaagggagggagcactggtttgcctagactagatgcatgcccgttttgttccgcaggatcgtttcttactttctttgttgtggttcctgcgccctgaacacgacgagtacttgattctggcatggatgtgctcccgatccacaaagctggattcgtttgctgcgtttagatccactccgtttgaattgacgttgtctccgccattattcatgcggtggagcaacatgtcttccccccttttttttctgttatagcagtttattttcagaagtttctggcttctgggttctaccgaacctatgccacatgttaatttaatcctggagttttatcttttttattatcccgtatatcttgatatctccacgggaaaacggagactggaaggggaaaagagagagagagagagaggcaatcttaagaatcgaattgatttattattctatgatttttttttgcaggttctgaggttcttgattgaccgcccgcccggcctgtcactgcaatggtcgccaagatgttgccatgctcatggatctcggcgtgcgtgctcgtgctgctcttgagcctgcacccgcgtgtccatgccttctacctccccggcaccttcatgcacacctactcccctggagaggtgatctcggccaaggtcaactcgctcacctctatcgagaccgagctgcccttcagctactacagcctgccatactgcaagcctctggatggcgtcaagaagagtgccgagaaccttggtgagatcctcatgggtgaccagatcgacaactctccataccgcttccaagttaatgtcaatgagtcagtattcctttgcaccacggacccgctcaccaaggagcaggccgagctgctcaagaggagggcacgagatctgtaccaggtcaacatggtcctggacaatttacccggtcatgcggttcaccgagcagaacggcgtgataatccagtggactgggttcccggttgggtacaacccgatagggagcaatgaggattatatcattaaccacctcaagttcagagtcttggtccatcagtaccaggcgcagggcgatgttgtggtcacgagtgaggatggtgttgcaatggtagagtctgatcgcaagagtgggttccagattgttgggtttgaggtcgtgccttgcagcgtaagacgtgatcctgagtccatgtccaagctcaagatgtatgacaaggtcgactctgtgaattgcccgttggagcttgagaaatctcaggcgatccgtgagaatgagcggatcacatttacctatgaggttgagtatgtcaagagcaacatcaagtggccgtccaggtgggatgcgtatctgaagatggatggtgccaaggtccactggttctcgatcatgaactcgatgatggttgtcttcttcctggctggtattgtgtttgtcatattcttgaggacggttcgaagggatctaacaaggtatgaggagatggacaaggaggcacaagctcagatgaacgaggagctctcaggatggaaacttgttgttggggatgtcttcagagagcccagctttccaaagttgctgtgcgttatggtcgctgatggtatccagatcactggtatggcagttgttacaattgtgtttgctgccctgggatttctctcacctgcttccaggggaatgctcctgaccggaatgatcattctctacctcttccttggtatcattgctggatacgttggtgtccgtgtctggaggactatcaagggaacctcggaagggtggaaatctgttgcttggctgactgcatgcttcttccccgggattgtgttcatcatcctcactgtgcttaactccattctgtggggcaagaagagcactggagctctacccatctcactgttcttcaccctcctggccctgtggttctgcatctctgtgccactcacacttattggaggcttgctaggcacacgtgctgcaagcatcgactaccctgtccgaaccaaccagatcccacgagagatccctgagcgcaagttcccctcatggttgcttgtgctcggtgcgggaacattgccatttggtactctcttcattgagctcttcttcatcctttccagcatttggttgggaagattctactatgtgtttggcttcctgttcattgtcctcttcctgctggtcatagtctgtggtgaggtttctctggtcctgacctacatgcacctttgcgtggaggactggaaatggtggtggaaggccttctttgcttctggctctgtcgcattctatgtgttcctctactctattaactacctggtgttcgatctcaggagcctgagcggaccagtttctgccacactctaccttggctattccctgatcatggcccttgcaatcatgctctccactggcgccattggtttcctgctctccttctacttcgtccactacctcttctcgtctgttaagattgattagaggtgtgccccgctgcctctttctgcaatagagtcatctgatcatggtaatagttaccctcttagaaatactacacaataaatcaaatggaaaaaatggatacatggcaacgcccatggcttttggtcatgattaattcaatcatttagcgcagcacagtcactcaagttgaaacttaattcttaggaatgattgtaagttcttcagctatgtttattgcactttgtaataccattcagttttgcttgctctgggcatttgtgagcagcctttggttttggaacacttgagatctattcaatatgaaaatgaagctattcatttacagttcgttactaaaaaaacaagataaaaaaaaaaaattaagacaatattgtagccgtccacaacactgttggtgcacagttctttcgaggtctctctgccatcaacgtcgatccgccccaccctcctccccatgccgtcgaggacctcctaccccttagctccacgattacggggatccgaggccgccatcaacgccctcctccccacaccatcgatggcgcgcgcaggcaacaccgcccatgatcctcggctgatcctcgccatcaacgcgtaggcaacaccatcgatgaacaccgcc

SEQ ID NO: 5124 - DNA, 2090 bp, Zea mays
  misc_feature (10)..(10): n is a, c, g, or t
  misc_feature (208)..(208): n is a, c, g, or t
  misc_feature (220)..(221): n is a, c, g, or t
  misc_feature (236)..(236): n is a, c, g, or t
cagaaatcantatttttggggaccgtagtcctggctatgggggggaaggacgtataaaaaaagtcctcgctactttgaggttgtcgatgacagatctgggaaaaacaactccagttcaaaggtttgaagaccgttggtcttcggagcccagaaaaccagatagtggatctccagatttccagaaagaaggtggggggggggaggctgngttacgtccagnnagggatatattgggngacaatactcctcaacttcgggttggggaactgtcaaagccagctactgaacctccaaagccaagcgtagtcagaccaattgatcctccaaagccgagtgtagtcagaccaattggtcctccaaagccaaatggaaccagggcaattgatcctccaccccgcacgaggacaatatctagtgccagcagcattggttcttcagaaggcacatcagaacagacaaaggtggcaagtgctgtaagtttaattgattttagtgcagatcctgaacctgcgtccacagcaccaccacaacccacccctatgccacaacaacctccatttaacgcagcagcaccacagcctattcttgaacaagggaaaagtgttccttctgtcagtggtggtgactgggcatcttttgattcttttggccaacaacaaacactacaaacaagcagcagtgtaaatcctcttgagtctgcacttgcacagctgtcattctctgaagcaccctctgcaccaaatgtgtcagcttatcctgtttctcttgatcccactttgaaagcaaatgatggaggacattcatctgtgctagaccagtcacattccttgtttgatgcgccctttggaatctcaggcaaccaggcctcaacagtaatgtccggccaaggatcatcagttcaacaatctcctctagctgccccaacagctggacctccatctcaagctactgcaaatccacaaggaaccagtggtattcaaggagcagcctcttctactgacagtaaattcagtagcaggaaagaacttccagcggatatctttactgcactatatccaccatcaactcaaatgatgcctggctggcagagagctccccattttggaatgggatacgccatgcaatatccacctggagtgggattgcaatcgtatcttcacggagcatttcctcagcctacatatcagcaacctgtatattcacaacatgcatattcccacccccaacctgtgaaagcttcaaacccttttgatcttgggaatgagtcagctcatattcaagctcacatgcccccatctgggccacctggagcatcagcaggttcagctccccaaaccttaattcgtaactctagttttggtgttcctccacagcagcctcaccagctctatcagtcagaagcgcatctaagccattttatgatgcagcaagttccgaacagcatgcccatgcctgaacaacaacctaatagcatgcttgcaacgcaacaaggtttgggttccttcaacatgggttttgatcagcaagctcctctcggatacccccaggcaaacacctcaccttcctacggctccgttggtggtggtagtaatccatttggctgaaagaagtgtggaaatacctgatcgttcatcactagacgaagggtctgcagcactcagggggacagacatgcatcgaagccctggagagattgtgtttcatacaacaaggtggtgtatcttgtcggccgtagtctgttgtacaacttgtttccaaaggcttaatgatcgaatataactctgttttggagggcctaagctgatttcagcctcattccatgtacattgtgtctggcgttctgcttggattgcatagtatgtatattgtgtttcttcgttgttgtcatggacagtgtcagctcctgttttagtacaagttgtttctagtgcacttgattattcgatttaatgtggatgattagtacactatagatcagatgtagaatcgtgatcgatcaattttgtggtttctttttacttgctatcttagtaccacttagggcggacgcgcgcgttcgtgagcgttttttcttgtggaactcattcttg

SEQ ID NO: 5125 - DNA, 2405 bp, Zea mays
ttgggtacctcgaggccgagccattcccgatcccgccccaaccccaatcgacaaacgccgccccttctcgtctcgacctctccccaccggctaaccctagcagcggcacgcgggcgacggcgaccagtagagggctagtcgcgccaccggcgaagggattcagcggtctacccgtcctccgacacaggcgcggcggcgtcctgcagattattattggtttgttgcaaaatgtctacggaagcgactttgaacaattctggtggttctgaatctgcattgctgttactggaacagcttgctgaagtttttggaaagttgaaaactcacaccgaaacatttctgcatttgcaaaatggcataaaatgggaagatattgaagggcatttcctcagccttgatgagtcgtacagaagcaagtttgatgaactggtagagaaggagaaggcattagaagaaaagaaagctgaagcttgtagattgattgcagagaaagaggctaaagtttctacaaaagagcatgcctcactgaatcagcttcaggagctaagggatgctgctgtctcttctctagcagaggttcgacaaaaatataaggtggagcttgctgagatacttgaagcaagtggaagcaaagacaaaaaggtaagtacctcaatcaatgacaacaatgcatctcgtgcttcagaggagaatacccctgctagtgggtcgggcgaggcatctgaagctttacctgttgagactaagccgcgccctgtattgaagcaactatgtgaacagatggacaccaaaggccttctgaaatttctttcagaaaactgtagaaaacttgctagctttcgtgatgaactttctgttgcactaaaatgtgcaactgatcctgcacgcttcgtacttaattccctggagggtttcttcccaccagaccaaactaattcacctgggagtaaacataatgcccttgaggtccagcgcaagagctgcattcttttaatggaagctatagcacctgcactagggatgaaggagcctggtggcgacgacccttggagctctgaaattaaggagcaagccaaggaaattgccgaagagtggaagagtaagttagctgagattgacctggatgcttctaatggctattcattggaggcacaggctttcctgcagcttcttacaacttttaatgttgattcggtgcttgacgaagatgaactatgcaagatcgtagttgctgtctctcgtcgcaagcagactgctgtatcctgtcgctctcttggtcttaatgagaaagtaccaggtatcattgaggagttggttaagcggcacaggcaaattgatgcagttcatttcatacaagcttttgggctttcggagacattcccccctgcacctctgctgaagacatatgttgaggaacaaaaggatacaattgaaaataatggcgatgcaactgcgatctcattaacggatgaccccaaatctagggagctaattgctttgagggctgtgattaagtgtatcgaagagcataagcttcagaaggagtgttcacttggacctctccagaagcgtgtttctgagctgaagcccaagggtgagaaaaggccatcaagtgatgctgggcgtacttatgcaaagaagcctcgaggccctggcatttcatttcctaggagacctgccggttctgttggttcagctgctcgcaggcctccatttccgggctatacctggcagcgtgctcctgcgccgatgccctcccgtggtcctgctccagtgccctcccgtgcccctcttcctgcccctcttcctgatagatatggagctgctgaccggtaccattacacaccaccagccccagcatacgactctggtgcattttcgtcttacagtgaacctttcagtgccccaaaaccattccagtacactccagggtcagtggcagcatcatacaattcaagcccctataaagtcgcttatggtggcccaggagcaccagtcagaagcacctatccaggttatgccagcgcatctgggccggctgcttccagcagctatgcaaattatatgggatccgtatatcgccctccccagcaaccatagattcgactcctccctcaaaaaatgttgtgctggtgatgcaagacatggaaaccagtccctcccatccaactcccatggcggagatgtaaacttgagctattttcttgtttcatcgtccacaacagtggggtttggaggtgtatactgatgctctcatgtccagctacatctacaatgtaccttgcactcttgtttgcttttagctgtgcttattcctgagtcgttgaatgttttatattttctttccacaagtctgtctcatgtagggaactgtctcatctaggaatataactcctttacttgct

SEQ ID NO: 5126 - DNA, 3119 bp, Zea mays
ctgcagtggcacgtcctgcactaaacaaatccaacacggcgtgctctctcgccattaaaggcacggtctttctctctccttcgctcctttctgtttctctctccagagtggagtggttggtgctctcagtcccaggacccagggtggccgtggcctctgccaatagggccgggccggggctccaccgcacaccgggagggagagatggtgggaacgagcccagggggaggagtgttctgtttctcctccatggtctcctctcctcggctcctcttcctgctcctcgccggcgcctcgctatgctgtgtggcggcgcagaagacggacacgctgcggcagggggagtcgctgtccggggcggcgacgctggtgtcctcgccggagggggtgttcgaggcgggcttcttcgcgccggaccccaagcagccttctcgccagtacctcggcatctggtaccacagcatctcgccgcggaccgtcgtctgggtcgccaaccgcgtcgcgccggccacctcggcctcgccgtcgctcacgctcaccgtcaccggcgagctccgcgtcctcgacggcacggcggccaacggcaccgccgacgcgccgctgctctggtcctccaacaccacctcgcgcgcgggcccgcggggcggctactcggcggtgctccaggacactggcagcctcgaggtgcgcagcgaggatggggtgctctgggacagcttctggcacccgacggacaccatcctgtccgggatgcgcatcaccttgcaggcgccagggaggggccctaaggagcggatgctgttcacgtcctgggccagcgagacggacccttcgccggggcgatacgcgctcggcctcgacccgggcaactccggtcaggcctacatctggaaagatggcaacgttacgtactggaggtcgggacagtggaatggggtgaattttataggcattccatggaggccactctacaggagtgggttcacaccggcaattgatccagtgcttggaaattattacacatacactgcaacaaacacttctttgcagaggtttgttgttttgccaaatggcacagacatctgctacatggttagaaaatcttcacaagattgggagcttgtctggtaccaaccatcaaatgagtgtgaatactatgctacatgtggtccaaatgcaaaatgcactgcatcgcaagatggcaaggcaaaatgcacctgcctaaaaggttttcatccgaagttgcaggagcagtggaatgcaggaaattggagtcaaggttgcatcaggagcccacctctgggttgtgagaccaatcagtctggggatggatttcttccaatgggaaacataaagtggcctgatttctcatattgggtatctacagtgggagatgagcctggatgcagaactgtctgccttaacaactgctcatgcggtgcttatgtttacacagctacaacagggtgcctagcctggggtaacgaactaattgacatgcatgagttgcaaacaggggcatatactctaaacctgaagcttcctgcttctgaattgcgaggacatcacccaatttggaaaatagccacgataatatcagccatagtgttatttgttttggctgcttgccttcttctgtggtggaagcatggtagaaatattaaagatgcagtgcacggaagttggagatcaaggcattcgtctacccaatcccagcagaatagtgctatgctggacatctcgcagtcaattcgttttgatgatgatgtggaggatggaaaaagtcatgaactcaaagtgtactcgctggaccgtataagaactgctacaagtaattttagtgactctaacaagcttggagaaggaggatttggtcctgtctatatgggaactttacctgggggagaagaagtagctgtgaagaggctttgtaggaattcaggtcaaggccttgaagaattcaagaatgaggtcatacttattgcaaagttgcagcaccgcaatcttgtaagactactagggtgctgcatacagagggaagagaagatcctggtgtatgagtacatgcctaacaaaagtctagatgcattcctctttaatcctgaaaagcaacggcttctagactggaagaaacggtttgatataatcgaaggcattgctagagggctgctatatctccaccgggattcgaggctgcgagttgttcaccgtgatctcaaggccagcaacattctcctggacgcggacatgaaacccaagatatcagattttggaatggcaaggatgtttggaggggaccaaaaccaattcaacacgaatcgggtcgtcggtacatttggctacatgtctcctgaatacgcaatggaaggcattttttcagtcaagtctgacgtctatggcttcggagtcctgatcttggagatcatcacaggaaagagggctgtgagcttccactgtcacgaggactccttgaacatcgctggatatgcgtggcggcaatggaacgaagacaatgctgcggagctgatcgatccagtgataagagcatcgtgctcagttcggcaggtgctgagatgcatccatattgcgttgctgtgcgtgcaagatcacgcagatgagcgacctgacatccccactgtcatccttatgctgagcaacgacagctcgagccttcctaatccgaggccgcctacgctgatgcttcgaggccgtgagatcgaatccagcaagtcaagcgagaaggaccggagccactccattggcactgtgacaatgacacagttgcatggaagatgaagtataacacgaaaaatatactgaatttgtgatatatttggttttttttgttctcccttcctgatgttgataatttgccatttgtcgcggattagtttcctctttttctccttttcatgacggcgaccgcgaagttgtatgaaaatcacattagcgtcatacattaagtgacaattaattttgcaaaggtgagatatttaccaaaaaaaaaaaaaaaaaaactcgtgttgttcggttatttcaattccatatggattgaaagtgtattaggatgtattttgatttgctatggatttaaaccgtctcaataaattatctcaaaa

SEQ ID NO: 5127 - DNA, 3199 bp, Zea mays
  misc_feature (3170)..(3170): n is a, c, g, or t
gaagatagaagctgaatgccgacagataaagttggttgatgctccagtatctggtggtgtcaaagggcggcggatgggacactaactggacagatgaagccctccattgcactggttctgttctatcagcgctgagtgaaaagttgtatgtaatcaaaggaggatgtggagctgcaagttctgttaagatggtcaaccaacttcttgctggggttcatatagcttcagcagctgaagccatgtcatttgctgctcgactaaatttgagaacgagaagagtcttcgaaattatgcaacatgcaaggggttattcatggatgtttggaaatcgtgtgccacacatgctcgataatgattatacaccctattctgcagtggatatatttgtcaaggatcttggtatagtatcttgtgaaagttccaattcgaggatcccagttcacgtctctagtatagcccaccagctgtttatttcaggatctgcttctgggtggggtagatatgacgatgctgccgttgtgaaggtctatgagacattaactggtgtaaaagttgaagggaaggctccgatgctcagtaaagaagatgttcttcagtctcttcctgctgaatggccagaagatccaattgataatcttgtacctattgcatctcatagtagcaaaaagtttcttgtagttttagatgatgatccaactgggactcaaacagttcatgatatagaagttttaactgaatggcctgttgaagcccttgttgaacagttcctcaagctaccaacttgcttttttattttgacaaactctcgttccatgactgctgataaggccatgctgctagtacaaactatctgtaaaaatcttaaagctgcggcagagaaggtccctggtgttagttatacaatagtcttgagaggtgattcaactctacgtggtcatttcccagaggaagctgacgctgctgtctccgtattaggtgagatggatgcttggataatctgtccattttttcttcaaggtgggagatacactattaacgacatccactacgtcgcagactctgatagattaattcctgctggtgaaaccgaatttgccaaggatgcagtttttggctataaatcttccaatctcagacagtgggttgaagagaagaccaaaggacgggttttggagaaccaagtttcaacaatttccataactctcttgcgtaaacaaggaccaactgctgtttgtgagcatctctgtagcttggagaagggctctgtgtgcatcgtcaatgctgctagtgacagggacatggctgtctttgcttctggaatgatccaggctgaattgaaaggaaagcgatttctctgccgcacagctgcaagttttgtgagcgcaaggattgggatcaagccaaagccacctatctgtccaaatgaccttggcttaaaaagagctttaactggaggcctcataattgttggttcatatgtgccaaaaactacaaagcaggttgatgagttgcgatcacagttcgggcaatctcttcgagtcatagaggtgtctgtcgagatggtttcaatgaaatcaatggaggacagagaccaagaaatcagacgaattgttgaactagggaatgcttatatacaatccagaaaagacactctaattctcaccagccgccaactcattactggaaaaactcctgaagaaagcttagaaattaattataaagtgagttcagcactagtggagattgtgagaaggattgatagtaaacctcattatatcattgcaaagggaggaatcacttcatctgatattgctacaaaggcgctggaagctaaacgtgccaaagtcatgggacaagcattagctggtgtacccttgtggcagcttggtcctgagagtagatttcctggggtcccttacattgtttttcctggtaatgttggtgataacagtgctcttgctaaagtggtgaaaagttgggcttccccatctagaagttctacaaaagaaattcttcttaatgcggagaagggcggttatgctgttggtgctttcaatgtgtataaccttgagggaattgaagctgttgttgcagcagcagaggctgaaaagagtcctgctattcttcagattcatccgagtgctctaaagcaaggtggagtcccactggtagcatgttgcattgctgctgcagaacaatccagtgtgcctatcagtgtccactatgaccacggcatttccaagtcagacttgcttcaagctcttgaagcgggatttgattcagtcatggtggatggttctcatctaactttaggggataacatcttatacacaaagagcatatcttccttggctcatgcaaaaggtttacttgtggaagctgagttgggtaggctctcaggctctgaagatggcatgaccgttgaagaatatgaagcaagatttactgatgttgcccaggctgaggaatttattgatgagacaagcattgatgctctagcagtttgcattggaaatgttcatggaaaatatccacctagtggaccaaaccttaaattcgacttgctaaaggaccttcgtgcattaacattaaagaaaggagttagcttggtcctccatggagcatctggtctatctcatgagctcgtaaaggagtgcatagacttgggcgtgagaaaattcaatgtgaacaccgaggttcggaacagctacctggcgtccctcagaaagccagaaaaggacttgattcaggtgatggcgtctgctaaagaggcaatgaaagctgttgtagcagagaagctgcgcctgtttggatcatgtgggaaagcctgagcgaagtacttgcgttgcgccggcaacatgcagtacaagaccgactgcatcatcgggttcgtgatgctgctgctactgtgcagttgcttacagttacagctcattgcgttgaacagctgaagtggttattgtactttgcagtgtagcgcaactaaggctaattcataaatcgtaataatgtatgtatgctgccccgctgtaaaaatgctccgtcgttaataaatgccatcgcgcttgctgtgccttttgtttacaaaaaaaaaaaaaaaaaaaaaagagaggcacacaaaaaccaacgaactacacctataagaaatctcgtgcgccggccccgttcanttagctcccgcttccccccttgcgggggg

SEQ ID NO: 5128 - DNA, 1234 bp, Zea mays
aggaaggagcgagtttctacaacttctcacgttcctactgttgttgggagggttcggagtccagatcagagatctgcgacaactacgttgtcaacactcagcaccgtttggaaggcttcaaggctggagccagagggaccgtgccaaacgggcctctgctccagctaaccgcctgcctgccttttcttctctcgtccaccctaggtctcagtctctgctcgcgctcttgtggagctactaggtgaccgtcgcggccgccctacgccacgtgctcgatccagcctcgtcggcttcttcgcacccgtcaccggcggtcagcacccaccaggttcatagatggcagagacggtgttcaccccctctttggaagggatgaagcatgtgaaggcagagaacggagtcattctcaccaagcccttccttgatgtctgcaagcaaatcttgcctgtcctggataaatttggagctgctatggcaattgtaaagaatgatatcagcggcaatatcacaaggctggaaaacaagtattcttcagatccatcaaagtatggacacttgtacagcatggttcaggaagaagttcaaaacaagaccgcgaaaggttcctcaagctgcacaaatggtcttctgtggctcacgagggccatggatttccttgttgagttgttccgtaacctgcttgagcatccagactggaccatgactcaagcttgcactgattcatacaccaagaccctgaagaaatttcatggctggcttgccagttctagttttacggtggccatgaagctctctcctaatagagataaattcatggaggtcattagtggaactggtgatatcaatgcagatatggagaaattttgcacaaccttctctccttttctcaaagaaaatcacgagtttctggcgagcgttggtcttgatgatatgaaggcttcgtagagcgatctccaaggtggtgattacaacaaaataagcgtgtcttatcaaactcaagtgttgcagaggatatacctgttttctgtagccatctccccattgaaaattatacagggtgataataatttttccgcatgattaaccatggctacttacacagtgacttgacagtactctacaaatttactttccaaagttagtccctttttttcccagataatctacatatgatatgaaattctagtgcaattaataaataaattcctgcaaaaaacagaaccgttaccggcga

SEQ ID NO: 5129 - DNA, 5166 bp, Zea mays
caatgcattgaagctttttaggtcaagttagtgagttgaactaaattattcattattaaaacctttaggtgaatgtatttattcatttcactaaattttccatgctattcttttctctgccttgggcagaacattaaagatcgctactatggagttaatgatccagttgcactgaaacttttgagcaaggcaggtgagatgccatccctgacaccaccagatgatgagactataaggaccctctacattggcggactcgatagcagaataaccgagcaggatttgagggatcagttttatgcccatggtgagatcgagtccataaggatggtacttcaacgtgcaatcgcatttgtgacgtatactacaagagaaggcgcagagaaggctgcagaagagcttgctaataagctagtcatcaagggcgtgcgcctgaagctgatgtggggcaagcctcaggccccaaagcctgaggaggatgagtctgggaggctggggcaggtttcccacggagggctgctccctagggctgtcatatctcagcagcagagcggtgaccagcctcagccccccgggatggagggccaacagcaacaggctgcaccagcatcgtactacttcaacattccagcaccaccagcaacggagcggactgtgtatccatccatggatccacagaggatgggtgctatagtaaaaccacatgacagtgaaggcaaaccagggccgcagcaagccgggcaagctcaggcatcaagcaacccagcacaagggggcggctatcctgcaccaccgccatactaccatggtcagtatccaccatactatccacccccaccaccatacggtggctacatgcctccaccgcgcatgccctacccaccgcaatatccgccttaccagccgatgctagctcaaccagcacaggcacaggctagttcatctcggcaaccaccgcatgcaggtggagggcagcagcagccgcctgatggccctccagctcagcagcagccacagcagccaattcagaactgaagtcctgtcaagatgttgggtattggtactgctctaactgctcggcaggagaatgcaacccccgtgggtcaccagctttcgtaatttcttaatttgtggttaacagtaaaaactttgttgtattgcttatcaacgtttgaagaaaaaccgtgagatataccggatgtatccagcttctggattttgtggtacctgctgagtttcatcaaaaaaaaaaaaaaaacctaacgactagtaaaaatactgacgcaagctcataattgacgcctgcaacggctaaatgttaattctttatgatatagccaatccatctgatgagagcacaacttcaatgctgattgcttttgttttctgttctatctttgggattctctctccttttttttttaaaaaaaagaggttccttacgaatggtgtgatatgctagacgtacgatcagcaaagccacttggcgtctctctaacgaccaaactccagcaggccgcggccaacgctcctctccatggtcaaaaacgcagtgctcaccgtctccacgccggccaccgacggctctctggcagcgagcaacaagctctccatctccatctcgtcggggtcccgctgcacccacgggtgccggctcactaatttactcagcctgccgagcctctcagcggcgtccctcatcgccggccggttctctccagccatctccaggcactgcctcgcgaggtccgcgacttcctccagcaccccaacgacgttgtcctcgcccttgacgcggtcgtctaccacgtccatgagcctcccctccttgagcgcgcacaggaagctcacggagaggctcctctcgctctcgggcccgtcgaggttgagcgccgtcctgccggtgaccagctccaggagcacgacgccgaagctgtacacgtcgctcttgtccgtgagctggcacgtctgcatgtactcggggtccaggtagccgcaggtcccctgcaccagagtcacgaactgggcttcgtcggccggcgccaccaccgaggccccgaagtccgacaccttcgcggcgtaccggtcgtcgaggagtatgttggaggacttgacgtcgccgtggaggatcggcggcgacgcgcacgagtgcaggtagtccaacgccagcgcggactggtgggcgatcttcagccgagtggagagcggggcgtcgcagcggccaccgtggatgaaatggaacagcgtgccgttgggaacgaactcgtagaccagcatgggcacctccacctcgaggcagcaccccaggagcttgacgatgttcttgtggttgacctgggacaggatgagcatctccctgccgaactccttccggcctgcgccgctcgtccgtcgtcgtcgatacgcaccgcttgatcgccaccacagtgccgtccttgagcgcgcctcggtacacggtcccatggccgccacgcccgagaacgttctcgtcgccgaatcggcccgtcgcctccatgagctccgcctccgtgaagattgtgaacgcttgccccgcgcccgcgctgctgcctatctgctccagaagcagcaggcccccgtgctgacggaagtatctctgcttgatgtcggccagcttcttcctctcgcggatcaaatacgagcaggtgacggctatggccactatgaccacaccgacgcttatgcctgaatatatatattttttttctctccacatgttaactttactggtacagtttaacagtctacacgagaaggtaaaacaaaaagaggccactgtatgtaattgtgattatttaccaatagatagcatcgccgtggcagactgtgacaagccgcgacgcctgcagtagaaaccacctcgcgtgttgatgcaaggcccagctgggcatggagatggagtacggccacactcatcgatgtctgcaaaatgaccacacggtaagaacacgatctcagaaaccggcagtccaaaaacacagaatgacagcttctctgggtgtacgtttgacggaccttggcatccatcaacaaggtaaggattgcccctgtagccttgagagcagttgcaaaggtacccaagaccagtggccgaaccaacgcacacgctgtcgctgctacggcaggcgtaggaggccgcatcctgcctggcgacgtcgcaggttgtgttgcccacggcccagttcaggatagtcgggacatggccgtcgcgctcgtcccagaaggtcgtcgagttcaggtacgccgcgtggaacttgaacctgccagcctccaccaccatggcgtatctgcagcgctgtcgtgtgtcgtcgtcatcgtcaatagtggcgcttgtcgtactgttcttgtcgtccgacgtgtcgccctccttcacggagatgtcgtggtaggacagcttgctgctgagcgcaacctggcagcagccaacgccggtgcacccgtcctgcgctgccggcgtgagggtttcaggagcagcgctctgcgtcagacacccgatcacgtactgcattgtatgggcaggagagaagaatacacttgagtcaccgacaccattatcatattaaaaaataaataatctgggagaggagtagaggactttacgatggcagattgccttgaaccagccatgaggccgatcgcgtcgactccgatgacggtgaacatgttctccttctccgccaacgtgaacggcgtgccggagaggttcaggaggtacgtggtcgagcggttgttggggcacatggaggcgacggagctcatcacccggacctggccatggagcagcagtatgtcggccagtaccggcaggtcgccgtcagagaagtacgcggtgctgcttcggcggccgtcctgagactgagactcgttgcagtgaagctcaaaccccttctccatcgcgcagccagggccgatcccgaacgggtactcgatgctcacgtcgccacacttgctcgggcagtcatggcggggcgaggacgagcacgaggacggagcaggctcggacgaccttaggctgcagcggaagagcaaggctgaggaagaagagcagcatcttgacttttggcagagatttgctcgatcggcgtacacgtttctgtgttccgtgcatgtgcgcacatctatctatgcctctatactatatatatatacacacatttgagttgaatcggtagatttctggtgacgaattcgccatccctgagcgacttggccaagcaacgtgatgtgatgagctcgtcgtcgtctctgaacgcgacttggccaaacacgcgctatgcttctgttgctgcttcctccatttcacatatggctgttcgtagcggactgaaaaacccgtgctgtattgttttgagttgagaagatgtgagttctgacgacattgacgtctcagctaattaactctccagtgggaaatgacaattcgatcgatggcatggaggaaataaaactattgcaactagcaacacaagtagagaagcagagagacgaggcaattcgatgcatgcatggaggaaataaaactgtgcatttgactggatctaatctaacaagagaggccggcatttctttagcacgacgaggagtcaaaattacgccccctgctgaatgcacggaaggtccttggggatagtttcttaattgcagcgcacatgactggaatcccgcctctgtccgatagattgtacatgtaaaacaagaacagcacgcgttttgatcgagagccagcgcttcaatcgctatgtcgtgccatatcaacctatcaggtttgtattatctatcaattctagactttatctgccacaacgctctagtgcatagtctttaccatcagcatatagtcacatcagcatcatatcaacttttgacttttagttaacacaaaacacaatattttttgaaattaaaaacatctggttacattattaaacaaataaaatttacagagtttataaaagttacataagttaaaaaaataaaaaagtggtttataaataaaatctaattgctatggtgcagattctacatatgatccattaaatcattttggagttgatcatatactatactagctagcatagcatagattatggtctcatcttgaaggatgactgcaaagctcgtgggtgctttggaagtgatggttggtgc

SEQ ID NO: 5130 - DNA, 4368 bp, Zea mays
cggccgagccaggtgaacgatctctccagtccggtccccccctggcccctaccccaaccctaccggctggttcgtcgcgcgcgccgaatcgtggagaggcgggaatctgacgcggacctcattggattccgtgcaggtttgctcgggtcttcgtgccagcgttgatggaggttccaaggtgacgtcgctatccggacggcgatgctgctggccgttggcaggtagttggacgcacagctggacgttccgatcaggagcgggaaggttgccgtcaccgtcagtgctgctgctccccaatagccgccgtagctgctccgttgcccttttgtttacgcagtagccaacagcaacagcaggcgccgtacctgtacgacggtgcgccggcatggcaccggctcgctcggacggtggtggcctgcacggtgcacgctggtggtggtcccggggggccccgggcgctataaaacgaggcagccggtaggagtccacggaatcgaaaacccaccgcaccctttcatcagcctgcctgtccactgttggcttggtgacttcctccgctccgctccgctcccctccgctcccgaacggtcgatctttgcatggcagcagcagctggctccaaggggcgggcgatcgctggaagcttcgtcagccgcgtcctcgccggcaaggccgcctcgccgaggtactcagacgggccacactcacccacacgcgcgggtttcggtttgccctgtgattctgttttttttttactatttttgagcgtgcttgttctcgatcagttcgtccaagatctcgccgtagttttaggcttgtagcagagcgatctgtctgttctttttacggccgttcttagctttgctctgggagtctgggtccggtgatccggtccctcggatcgatagtgcttattccccccccctccgacttgggacttgttgggaggatcttaccttcgtggataactataactctagttctgcagagagcccttgtttcgtgttggttcagtgtgctgctggtgccaagattttggtcagcagaaatatctagaagttggcgacaacagaatgattatcttctcacacgagtatgtagatatggcaaccctgaacatctcccagcttgtttaatcctctggccgtccgtccgagaacaatagaacacatactaggagtctaggactaggagggagagtatgtatcttcaacttgaatgcacactaccatctccgtataagtgatagaagaactccatccatctccgtagaagtgatagaagaaccccaaccaaagccagatccatgtgcttgtactacactagtaccacggagtccttctctccctcctccgtagatattactgtatttgttgttctacggttctgcccacttcagactgtcaaatctgcaaaactgtctgtcagcctctgccactaggaaaactggaaaagccaaacgccacgccacgccactagcaggctgcaggcgcacccacacaaagaagatgaggagcagtggaggcgcgcaggacgtgcacatcaagccgcgcagcaaacagcaagcgacctcgcctgattgccttccgtgttccatcgcatcgctttccgaaaggcggattgatgggtgggtctggtgcgcggtagttgtcgctcggctccaccctcaccctcaccagtgggcagtgcagtggccagtcactcactcctacccacctgccgatcttggctgccatggctcgcttgctttggttctcactcaaaggaaagaaaggaaccctctccacggtacgaccgggaccagaagcatccgcgtctgccgggccccacctaccgtcctttggcatccggtccgtacgattctgtttcgatcccatcgcgccagctgctgcgggacgccgggccgacgaccgatcggggccgtccgtccgtccgtggggtctcgcagtaggtgacatgcccatcggacggtgtttggtgtggacgtgtggtggatggtacatagtaccgggcgtggtacggtttgctgtggtgagtgagtgagtgggatcatggagggccacctggcctcgcctcgctcttgtacgaagtcatgcgcgcccgcccatggcccattcggcccatgtgcgcgcgcagcccagccgtgcgtgggagtccgatcgtgatgcgtttgctagctctgatgccatggcgccattgtttcagcctaggtgttgggatttttcatcttgtcatgaacgcgatgaacctagcgatcgtctgcacagcttcgtcagccgcgtcctcgccggcaaggccgcctcgccgaggagggccgtgcacgcctcggcgtacgacaagaacctggaggaccaggtgcgcccggcgttcgtgccggacgatgtgatcggcagcgccgggagccccgacaagtactggagcccccaccccaagaccggcgtcttcggcccggcggcggtggaccccaagctggccgctggtggcgcgccggacgccggcgcggatgctgcaggaggcacggtgctggaccagaaggtgtggttccgcccgctcgaggacgtcgagaagccgccccccgccgcgtgagccgcgcggcgctgctaggccagcccacactgctgctcgctcataaaaagggcggcgggagagcctggcagtggcaggcaccctgctcgtgctcggccgggctgggctccctgcttatatcactgcaatattatactactagtagtggtgcttgatagcagtgtgtggctgtgctaataccagtataatactggttctactataatacagtcgtatcaggcatggcgtgcatcaggactggttgtgatagtagcaacgtgatgctcgtgcctgtaataagaacaagcaggcgatgtgtgcctgtgatgtaccggtgtcgtcagtgttataagtacttgggtcaatggtttctgcaaaaaaaaaaaaaaaaattgcccgtgaaagctagagctcaaactctggtcattacaagccgagcacaccacaccacccaaatagcccttgaaacctcctacacatgcatggtaaacatcatacacaatcaccctaagaaaaccattatcatttaaagagcatatgttctatctatcgatattcatgcagatcgtacgccgtgacggcagatcttctgcgagaacactcgcttcgctaacacaacctttgatgttcacgcagaccatttgcatgaacctcggaccgaccgaagtattcattctagagagcctgagagcactgtctcaaattattgcatagtttggaaactcaaaggattgaaactacgtcaatttcgaagtggatttgagttttcaaattgaccccaatcaacaaattttgctccctactatctccagtttctaaggagatttgagtttccaaattagcccataaagatcttcacacactgtcatgtgggctagagagggtacatctgttgccaggcaacaccagagccaggcaacaagctcaacagtgaaacttctgaactccgaaacgtaataaactccgtcctcctcgtcctcgatccgtctcctcagctttcccataaccctgatcaagctctagccaattttgtttgtttcggacaccttctttcgttggccgatcgagctggagatgcgttatgcgtgtcgcattcagaatcaggaccgtgtggttcagtataaaatagaaatgtcatgtgtcagattgactccgaaccccgtatgctgccagtatgatcgatggctaaccatgcacgcttgccgcgtgactgtgactgaagcggaccgaactctgcaggcaggggcgcattacgaacgtacgccctgtgtgccagcctgatcgagctcgccgattggcctacccttaggaattattgtgtctgacagcgaggttttcgctgccgcccaaacggagaggattcattctacaattccttggttttcaaacttgacatcatggtttactacacatacgacgtgatagtgatacgacacttgcatgatgcatcatgtgcacacgtactggcagctcttatcaattgtatcatcgctgtaggagcacgcttgttattagttagtttacagacgacgcacctgtcgtgtcctgatagggtgtcgttattatcatatcgtctttgcatatacaaacagaagctgtacgttggggctgttctatcgtcgcatcgtctttccatgaatatttttttctttctgattcttggttagctgtctttcatttcgtgggacaggaacacgctgatgcgcgttctgctggtacgcctacggtgtcggcttgcgactgcgcgcgtgcgatatacagctgtgtgtcccggccgatcagagattttttttagataatggg

SEQ ID NO: 5131 - DNA, 1723 bp, Zea mays
ggcaaaaccaacagaacaggcctatgttcccatcgagtcgagtcgagacgagaccgtcctccgcccgagtctcgctcgctagctagggtttccaccaatggcggcgcccaccacctcccgccgcggccccggcggcgcgcgcaacatggacgacgagaacctaaccttcgagacctccccgggggtcgaggtcgtcagcagcttcgaccagatgggcatcaaggacgacctcctccgcggcatctacggctacggtttcgagaagccctccgccatccagcagcgcgccgtgctccccatcatcaacggccgcgacgtcatcgcgcaggcccagtccggtaccggcaagacgtccatgatctccctcaccgtctgccagatcgtcgacaccgccgtgcgcgaggtgcaggctttgattctctcgcctactagggagcttgcttcccaaacagagagagttatgctggctattggggaccacctcaacgtccaagtgcacgcttgcattggtggaaagagtattggtgaggacatcaggaggctcgagaatggggtgcatgtcgtctctggaactccaggcagagtctgtgatatgatcaagaggaggacactgcggaccagagccatcaagcttctagttctggatgaagctgatgagatgttgagtagaggctttaaggatcagatttacgatgtctacagatatctccctccagaacttcaggtggttttgatctctgcaactcttcctcatgagatcttggagatgactagtaagttcatgaccgaaccggttaggatccttgtgaagcgtgatgagctgaccctggagggcatcaaacaattctttgttgctgttgagaaagaggagtggaagtttgatacactttgtgatctttatgatacactcaccatcacccaagctgttattttctgcaatactaagagaaaggtggattggctcactgaaaaaatgcgtacaaataacttcaccgtatcagctatgcacggtgacatgccccaacaagaaagggatgccattatgggtgagttcaggtctggcgcaactcgtgtgctaataactacagatgtttgggctcgaggactggacgttcagcaggtttcacttgtcataaattatgatctcccaaataatcgtgagctttacatccatcgcattggtcgttctggtcgttttgggcgcaagggtgtggcgatcaatttcgtgcgcaaggatgacatccgtatactgagagatatagagcagtactacagcacacaaattgacgagatgccaatgaatgttgctgatcttatttgagcagcaagaggatcgggaggggagcttcttgtgttggcttgaggcccttggcgcaagtgtggctgtggactggagcagatgggctttgtagttgggggtggagcagagattatttccgtttttgccatggcatgaactgtatatattttagctcgctccagctcatgtaacactttgttgctgcgtttgtgcttgggacacgaagacctgtgttgatggcttcgttagtgtgacactgatttggcgtcggatttttgtttgtcatctgtcattcctgtgctgatctgaattgctgtttgtttattattattattattacaattactatcaattattatggttgactggtattacaattactatcgtgcattatggtttaaaaaaaaaaaaaaaaagggcggc

SEQ ID NO: 5132 - DNA, 6252 bp, Zea mays
  misc_feature (624)..(624): n is a, c, g, or t
  misc_feature (698)..(698): n is a, c, g, or t
actcgtgctccaggcatgccaccttcctctggccctacccccacccatctacccagctctggtctcttcgctcgccccctcttgccagcctcctccctcacccttttggtctctccctcagtcccttttctctcacaaaatattaatttactcatgtcctacatcgttctctggtggccgatagcagctctctccactgccttagctatctccagtagcttaccatcatctcttattttaagctccactatgaaaacagtacaatttataatgcaaaacaatattttacatagccatatgtacaatctgttgttcataaggtaagataatatccctcataaattgttatttcaatatttattttcaagtaaatgattggctagtgagttagaacctgtaggtatattcgatttaatgaaataggtagattagttagtgagttagtcaaactagattagtattgctagatagattgcttatttttagttaggttagattagtattgttagttataccaatgaaatcatctaggactctagtagttttagtgattaatagcgagataaaattattatggttaacatgtgttttgtagagataattaacgtaaggtcataatgatgntaattgtttaggaaatcgttggttttcatgtccctaagtatatggtattcattttgattttcaaatgatggacnatagggttaaggatgaactagttctaagtgtcaattgaagttgagggacacttagagtattttaggactttaactttttctttcaacatactatacaagaggatattaactagtagcttgaactaggtaagacccaaataagtttggatcaagacacatttacattttttcgaaagttggatatgttacaagggtttttgagttgttcttgtgtgatcttgtactcatgctcttgactttgcttctcgtgtgtgtgttgatgcattgtgcttttgtgtgtatattctttctccctccctactataagtgttgattgagatcattgtataaggatgtgagagactccaaatctatgtagattcctcacaaacgggattgtaatataaggaaaaactgtggtactgaagtttgatctttggatcacttaagaggggttgagtgtaaccctcatccattaggaagccacaacatggagtaggcaaacatattacgcttgaccgaaccacagtataaaaatcatcgtgtcacttgtgtcattgacttttttgctatttttctatcttcatagtttctttattctcacttgtgatattgatctaagtctaatttataccttgacagagcaatcaagtgaaaggaaccgctctctctttctatcctctcaaacttggtttaatttgcactaactctaacttttagaccaagtttatgtgttttaagtcatatttttttacctttaactaaacacatatataatgctaacacttacgatatattattaggattataagatgaatcgtcgaatgcatttttcttataataaaagtgtctaaaaatatttggtaaaatcatttataaacctagttaaattaagaaagtttgaccagcatgttcacttattgtaagagctaggtaggagtaccgcgtagctgcactgcaggccggcagcatactttaagcgaaaggtgccatctgcattccggacttccgaagtccacagtaggtatccctaaagtgcgtttgcctttgcaggaaacgaaagcatgagcggatccaaccttgaccaaatgaaaagtcgcatgcatgcgccctggacatggtcgtggcaccactgcaacctccaaaccagctctttgcggcagaaaagaaaaatcgaagcgcatgggtcgtagagctcagggcaatcaccaaatggcaggcaactccagagacgaaaatgatcgagcggacggatgcccaacccacctgaacgcaaatttctgatcagagcgataggaacttggcgtagggatgatgggatcgtggtggttggtccctgccgatgtgttgttcccacctgccgttcctaaccggcggctcactgcactggacaggccttctgaaaggcccggccggattcgccaggttgccagcctaccgtaccgccacgccgaaacgcgcgcagacctctgcactccgcacagctggggtccgaagagcgatgcttttttctcatgttgttcagagtttcagcgttcgcctccaattgtcaacttgctggggcacaaaagctagcaccatctctgctctgacgtttgattttcttgtaaataaattcagtccaagcgcatttcagagccgatctcaactttcaaagaaactgccttcctctgatttgtttttttatggatggatggtacatgcaaacggttcgttttcatgactactgatcgatctgttgcaagcatgaagcataactctagcttaattccaggcttcaccatttcacagttctccgagaattaaaaggtttcgctgttttctaaaacaaaaagagagagaaaataaaaatgaaagccggaaacgtggcacctagaattggactgagcgatcggatccggtgccatcatcgtctgtgtcaaaagattgtttccgaagatttgttggaacaaatatttgacactcgctgcattataggttaccaaatccacctcctccctcgcatcaaaaagtcagtacaaaatgacttcaacgcattagctaggtttattattatgcttgccaacgattcgtcataggcaggggaaggggaaaaaagagctagcacgcggtacgtacgtacgtacgtctaaaacgtcatggatttgacgctctaatcattgggttcggaagcccgagttcctttgcccgcaagtttcagcaagccgcagaaatatgttacgccgtatgtaggcagcatatgatagcggcagaataactaactaatcgaccggccagaggaagcgaaggagacgatgggcagatgggcaacaaacactccggccctcgtgacctctcttctctactacggcctgaaagccaagatgcgtagcaggatgcgcaagtgcaaattaatccctatcccagcgttagacttagaacgccgcgcgcagtgagtagaccatatacacacatggttgcaatgcaaataatgctggtgctttcgctgttttacacagaccgccgaaatgctcttgtggttgtcagaaagagatctgaaactcgacgcaaaatataatgaaaataaccgaacgacgtgacagcgtacgtaagcagagtgtaaaaacccaggcgttgttgtctggttgcagagaagcgtgtaggggagggaactgccccgttctgtgaaaatcgcggctccaaagtgggcaggccagtgggtgcaccaaaccacctgcacagtttgaatgatccgataccacgcgctgcgcgatgacatgatcgatcggtcagctcggagccgcacgcagcagtcactcgcacgaaccgcagcagcctccagctggtaatatttcccccatgctggaattcaaaaggctccaaacctaatcgaccaaccacaccccccccgcccgcggcgggaacggcacgaggcaaagccaacgctagctatatattccgtgcgcgccccgtggcgaagcctctcatcgcaaactcggaaaccttgagaggaaagccaccagcagcaagcgaagaccaccagcagcagcgcagcggcgacgtgtttcgctctcgccatggcgtcgtcgtcctcgtcccggctgctgctcctcctcctcccgtgcctcgcgctcacgctgctcggcgcggcagacgccgaagtgcaccaccacgagttcgttgtacgtgcggcgcacgcggcgtgaataatacgtacatgcatggtagacgtgtttttttccagcgcgcggctggaaataacgattctttttctttgcctgatcggtcggtgtgtgctgtgctgtgtttgtttgctctgggggtttgcgcatggtgctgctcatcgtcaagatccaagagacgccggtgaagaggctgtgcaagacgcacaacatcatcacggtgaacgggcagtacccggggccgacgctggaggtcagggagggtgacacgctcgtcatcaacgtcgtcaaccgggcgcagtacaacgccaccatccactggtacgtacgtcgttgaagctcgtttttctcaaccgtgagtgacatgacatgacatgacatcgatcgtctggtctgtctatactctctcccgttcatggccggctgtctcgatcaatgcgcgctgcatgcatggcgtgtgcaggcacggcatccgccagataaggactgggtgggcggacgggccggagttcgtgacgcagtgccccatcaggcccggcggcagctacaagtaccggttcaccatccaggggcaggagggcacgctgtggtggcacgcgcacagctcctggctcagggccaccgtctacggcgcgctcatcatccgccccagggagaacaagacctacccattcgccaagccctcgcgagaagtccccgtcatcctcggtctgcaccctgctcatcctggcccgttaatttgttgtttcattcacgtctctaataatctaacggacggtgatcgatgggcaggtgagtggtgggatgcgaacccgatcgacgtcatccgggaggcgcagaggaccggcggcggtcccaacgtctccgacgcgttcaccatcaacggccagcccggcgacctgtacaaatgctccaacaaaggtagctagctcatctcgcatacgatgccgcccatgcaaaataaacctgaacgaaacagagcatgctcacgatcgcccgtcggcatgcactgcagagactacggccatcccggtgaaggccggcgagacggcgctgctgcggttcatcaacgccgcgctcaaccacgagctgttcgtcaccatcgcgcagcacaagatgacggtcgtcgccaccgacgcgtcctacaccaagcccttcaccacctcggtgctcatgctcgcgccgggccagaccaccgacgtcctcgtcaccatggaccagccgcccacccgctactacgtcgccgcgcgcgcctacgtctccggccagaacgtggccttcgacaacaccaccaccacggccgtcctcgagtacgactgcggctgcgcctccgacttcggccccaagatacagccggcgttcccggcggcgctaccggccttcaacgacacgtccgccgccaccgccttcgccgccgggatcaggagccccgaccgggtcaaggtccacgagaacgtcgacgagtacctcttcttcaccgtcggcctcggcctcttcaactgcaagccgggccagctctgcgccgggcccaacaacaacacccgcttcgcggccagcatgaacaacgtctccttcgtcttcccgcagaccgactccctcctccacgcgcactactacaagatccccggcgtcttcaccaccgacttcccggcatacccgcccgtgcagttcgactacacggggcagaacgtcagccaggccctgtggcagccggtccccgccaccaagctgtacccgctcaggttcggctccgtggtgcagctcgtcctgcaggacaccagcatcgtcacgcccgagaaccaccccatccacatccacggctacgatttcttcatcctcgccgagggcttcggcaacttcgaccccaagaaggacgtcgagaagttcaactacgtcgacccgccccagaggaacaccgtggcggtgcctgtcaacggttgggcggtcatccagttcgtcgccgacaacccaggtgtgtggctcatgcattgccatctggacgtgcacatcacctggggcctggcaatggctttcctagtggaggacggctatggcgaactgcagtcgctggagccgcccccagttgatcttcccatgtgctagtggaggacggatatttgtgttgaggaagaaagcctggtcacgttgtatgttaattgttactcttttttggtggaggggggcgtgttcgtgatcttaaattcttaggggacttaattttccagcttgttggtttgaagtttcttctgtaaatctatgtaattttcaatgacattcagcatattatttgagaataaattatttctttgtacaaacaattaacgaaactaccggcctcagatgtgcaacatcatatttgaacactaagaaaaattcagctttgatacctcagggaaacattatcgtgtcctaac

SEQ ID NO: 5133 - DNA, 1560 bp, Zea mays
gaaaccttcgcgcggtgatggagcacgcgcacgcgacctcgacacgcacgcagcagccagcaggtgaccgccgtcacgcgaccgcttcccacactcccttccccaccagccgaaaccgaggctgacgctgcgcgagccaaccggcggtgatgcaggcggcagtcggccaccgcggcgccaaccttggctccccgtcactctcgcgcttccggtatggcttccgcctccccggccggtcccgcctcttctctgagggcgtggcggtggcgccactccgcgtcggctctctgccccagccacggacccatggcagcggcggtttcgcgcacctcggggccatggatggggaggcgccgaggctgccgcacgccctcaggagaatgcttatcgatcatcagaaaatggcatgtcccaaccttctgaaagctgctgtactttcaaccatgacattgcttgctgtacctcttgaggcgtcagcggagatgtgccagccacctagttctttcgccaatatgccaatttttattgttgtagctctaataggagctgctgttggcggattattagcacgccaaagaaaggcggaattgaagcggctcaataatcaacttcgccagatcaatgcagcacttagaaggcaggcacagattgagtcatttgcgcctggccttacttatgcgccagttgggagaacaaatgaaactgatgttattgttgacccaaggaagcagcagttggtcacaaacctgagaaatgggaagaattacatgaggaatcaagatcttgataaggctatagtggagttcagaacagctctggagcttgcagagagcataggtgatcgttttgaagaaaagaaagctgcccgaggactaggcgcatcgctgcagaggctcgggaagtaccgagaagcaatgagacagtacagcaaggttctggagctgtccaaggagacaggtgaagattccggctgcaccgaggcctacggtgccatagcggactgctacaccgagctgggcgacctggagcgagcggcgaaggtgtatgacaagtacatatcgaggctgcagcccggcgagtaaggtagatttctttacagacgagacagcgagttccttcccgttcgttgagttttgcgttttgtcggtcttgttaaactcactgcaggtattggattgttttgagaacggttttaatattcgtatataaataactattgatttaatcaaaaaaataaaaaaaaatcacaacgcactcgcccagctagtctccatccgtgttttacttaaaaagaaaggtgaatcgttgaatgtgaacaccgaaaatgcacgtaccagtccgtttgcggtgtctggtgtgtgtttggttatggaacagttgggacagctacatcatctctcgttcctccatttttgatttcagaggtagagacaacactagaataatcttgtaacctcggaatctaaacaaggggcgccctagagcggcgggacgtattttgggtgagagtcacgactcacgagccgtgcgcgcgcgagagaggggcagaccgttactgca

SEQ ID NO: 5134 - DNA, 2466 bp, Zea mays
ggctaaccaattctacatttgctacacggattttgcatatcacaataatgtttgtcgttccgtatctatgttttatttaaattttgtacttacatcgcaacgcactgacatataactagtaacctatataaatttgttaggtcgacagctggtccgttgctcaactagtctcgaccccgccacccgcggcatggttttttttttttttttgtgtatcaaacgcggtaaacatgcaacgatcgatagatacaggcaataatacatttttttgaaagaaaaaaaaggaggaaaaaggacaagcaacacaaagtcacaaagaaagacgatagatacgtgcatcttcacgcgtggttacgcgcgagatgcgtcgcgcaacggtgccctgcaaccgcgcacagtacccggcacgacgacaacacgcgcgcgctcgcgtctccgtctcacttgccggcggcatcggcggcggcggcggctggcttgtcgccgttctcctcctccttgttctcattcttcttcttcttctcctcctcctccgcttgctcgtcctcgtcagcgaaggcggaggcggggaacgagcggccgatcccgacgttggacttgaagtagatcttgtcgcgcttctccccgtcgaggctcatctcgacgatgggcacccagagcatgacctgcttgctgcgcaccccggtcatgcgcttcatccggccgtcctccacgtacgcggtgacctcggcgtcgtagcgcacccgcgtgcccgtgccgcggaagtagtgctcgtagggggccttctgccgcatccacacgaacccggtctcgcgcacccagccgcactcctccagcccccgcagcggcatcacgccgcccgggaagcccagcgcctggagcatctgcttggagtgcgcgaagcaggcctccgcgcccgtgatgacctccgcgccctcgcgctgcttgttgccgccggccgccgcggtcttcgtggacacggtgagggaagccatcgcgctgctagctagctagcggatcgaagcgggtgatcgattggagggaagggaaggctcgggcttcgctgccttcgagtgtgtttgttttttgcgtggtgcgacccccgcgggtcccaggggtgttttataggggaggacgggaggtacaagatcggagtgagtatagtagtaggtggttgggcgttgagctacaggcactggtcagtcagatcgtgttgggggttgctctgttattagctgaccaacaaagcgcgagacatgacgtttggcgccgaatgggtgcacctaaacgcccaccacatggaagttgccacccgccctgtgtcctgcacgaggacatgcatgctctccggaccctagtgatctgcttgtgacaagagcaactcttgcaaagtcaataactagtccctcaaaagaaaaaaaaatccaataaatatctctactaaagccatcaaatttaagtgaaccctcacatctctcctcggtctgggagtctccttaagagcaagtagaataatatgttgtaaacatactctgaatactgaggtagagaagagaagaggagaaaaaactcaaaaagcgatcgagttataaatttatagctggctttgacataagaaccaataaactttgtgaaagagacaaataagtcatatattaacagtgaaaagttaactactatacagatgtgctaaaagataggctgtaaaaatctttacaattagcaattagctatattattagccttgctttgagtccctcaaattttctattgcggtcgttttcactctgaacgcgcaagaaaccatgtccacccggaccccaggtcctctgctccatcatacacgagcctcttccaccggcatggttccttttggtgacggagcttgtaatttttgacatctagggtcactatctaagttaacccgtatcaaatcatatacatacccatatttttagaaccgaatgataataatacgtcttacataaataatgttcttaataattaaacgacttgataaaacaggacacagtaagaaatagcctaactacaaatgatttcgtctaccgacgttgctcactaggactaaatatgttagacattccaagcaaattatggatatgaactaaatatgttattaattagagagagaaaaataatttagaacaaaaatacgcaccataccacttgcattgatacgaggcaatggaagtacttttttttcaaaaagtaacatccatcaatggtccttaaacatggcatgttgtatcacatcggtccttgaactcttgaaacccgaagaaaaacaggtgctgaaacttggcgggctattcaaaatcgttcaatatagggttttgcttaaatcagacgtcgatattgtgtgccattacttgggtccccgaacttattaaaatgttgtgtcatttgagctccccgaacttgacatgttgtgtcaattggatccca

SEQ ID NO: 5135 - DNA, 1819 bp, Zea mays
cagtgatgctgagactggcatgtctgaggaggacatcctcttacaagatgaaatatgtaaatctcggttaatgagtataaaacgggaggaagaacagtatatgagagagagagcgcggcatgtcgttggaaaaggggaggcttatacgagagatgaagcgtctcagagatgaagatggctcacgctttaacaacttccaaattcttcaccatcgttatgctctgttaaatcttcttggaaagggagggtttagtgaggtttacaaggcttttgatttggtggagtacaagtatgtggcatgcaagcttcatggattgaacgctcaatggagtgaggagaaaaaacagagctacatacgtcatgcgattcgtgaatataacgaattcagcacgacggttcatccaaacattgtcaggctatgggatatatttgagattgatcacaatacattctgcactgtcctagaatattgcagtggcaaggatcttgatgcagtccttaaagctacaccaattcttccagaaaaagaaggaaggatcataattgttcaaatatttcagggcctggtttatctaaacaagaggggccaaaagatcattcactatgatctaaagccgggcaatgttctctttgatgaggttggtgttgcaaaagttaccgactttggcctcagcaagatagtggagaatgatgttgggtctcaggggatggagctcacttctcagggagctggaacctattggtatcttcctccagaatgctttgacctgagcaaaacaccatttatttcatctaaggtggatgtttggtcagctggtgtaatgttttaccagatgctcttcggaaagcgtccttttggtcatgaccagacccaggagagaatacttcgggaagatacgattatcaatgcacggagagtggagttcccttcaaagccagctgtatcaaatgaggcaaaggatctgatacgccggtgcttgacatacaaccaatcagagagaccagatgtactaaccatagctcaagatccttatctctcatacgcaaagagatagccgctatgccggagaacactaaggcaagggtagctgatcatttaatgagattatttatgtatggggatggataatcttgcgaaggagcaaagtgttccacaagctcaagaagaccacaaagggtgtaactgtatatgttgtaaattttagtctttcccatcgcagcaatgacctgaaatccagaagccatcagttcaacggacagcttctttgtagcgtagagaaagcaggcattggtttgaacggggcatgcgtaacgtgatggtttcttggctggtgggctgtgggcagtggtcctgttgatggttggtttttgtttgctcatactgtcggtaaggtctgccaaatcagaaaccaccggtgacaggcgagagctcacatgctcacctccgaaaaaaatctcggccttgcactggcaggatggactggattttgcgtattgccaaaacagatttaaggtagcatgcatcaatacaggttactttggataacctatagactcaccacagccacaagcacagaagctcttcgtacaatttcagagagtaccgatgtgccagatttctgctggtgccaatttgtttgtgatcgctgtcacccttgtacaacactgggatcgctcattgagcatacacaagttatgcaatttgcttttttattatagtcatctttagggcgtcgttttgttcggaacggattctttggaactttaatgttagttttatttgtgttaaaactgaacgtggaatagttccaggttatat

SEQ ID NO: 5136 - DNA, 2286 bp, Zea mays
  misc_feature (180)..(180): n is a, c, g, or t
tgatttttgtaagttcaagaaatatttttacttccactgtgtactgatgcttcattgtgttttttctgatggtggatcccattatccttcagttaacaaggaggacaaagaaactgcaagttactctatcgtgtccaaaactgactcagaaattttgttgcaatctgagactaacgaagncaaaaatggagccatacacttgtatgtcattggcccaatattctttttacagaattccttgctattagtatttgctgttgaattcgtgcttaaacttgtttatgtatatgagcttccctgcaggctggcacttgatttgtcgtctctctcaggcggtgcgcctggacgaacaaggggccttaagattggctcagttaactccttttgacaagggcttatattggcgttttagatgacccaaagcattcttcaaaatgatacagcagaagcactgacttgaattttggatcaattcccatgagctgatatcttcaaaaacatcttagttaggaaaaagaaggaaacgaaaatggaatttatttccatttgttatttgtttgggtgccacaaggaggcaaaatcatagcaaggaattgtaccttatttttttagggattgtgtacttttctgctgttgagaggtatttggtggttggataatgtgatggagcctatctaaatgttctttcatagtggtctgaataacattgagctcattgctggattatgttgtgattctttcaactcttgggtcatgttgcacagaactaactcatagttctgaccaaagagaaatgtttttttatgttaagtacgccctgccgtaagcaagtgtaaactttggggacaaattgcttttcatgtatttgagtttgatatttgaaaatggtacaagtatgttcccaaacgtcactttgcgactatgtttacaagctcggccctcttgccggtctggtcctctcgctggcgtcgccgcaggcgtcacgcgccgcttcatcggacaccgtccagaccggcggagcctccgatgcctctgccggccctagcgcgagttgcgagtgcgctttggcgtggggcagcggtcggagtgcgatggcgatcgcgagcacgcccgccttggctcgaggcagcgatcggacggcgaggacgatggcgcgtcgcatattcacattgtacctacgagagggccttcttgaagaaagggaagacaggtatgctttcacctcaatccctcactgatctgtcattctgtcttctgaattaagacttagctccagattagcagcatttaccggtcaccagttatttcttccctgttacccttttccagatctattttttagtctgaattcaaataaccaatattgccgttcaagttgagaaaatatcgttctctttgtctctaatagctgcatgtgtggacatcattaagacgtgtcacaaacatgatgcacctgtgacctgacacaactagaataagaatgaaacttgagcatcatggttcgaattccattcacatcaactggaaatatatttagctcatcatctgtaaagaagtactggcatgtatttaacatgagactttcaaaagaacggcatacaagaggctgcaggctcactgcaaatcaacattgctcagaagtcaggccggttggtcttggaatagcaaaggggccctggcagcaaagcgaatttagatatgttagggggtgtttggttcctttagtcatactcctaaactttagtaactaaattttagtccccaaaaattctttttgggagaactcatttagtcctaccgtttggtagtttggggattaaaagtgactaaattttagtcaactaaagtttaggaggtgggaaccagatagccccttcatcactattttgatttgcttaggtcagttacggattctgatcagcgtatttatcttgaattcttgtgcaaaatcgacaaccaagagtattttctaaattttactccgtagactataagggtgattcatgcaaccaaagtcaaggcttagctatagattccttttattctagccatgagaaaaccgtggtaaactatgagaaagctgaaaactatttggttgtatcaattatagagcatgacgacatgacaacctagcagaaggcggcacggtccgagaggacaagggggcggtacgccgtgctgtgggaccctatgcccgcagcgctaggcccaagtgtcatgactgtagtcacgcttacccgaacgtgtccatgacgttctacacgagcagtgtgcacgatggtagca

SEQ ID NO: 5137 - DNA, 5035 bp, Zea mays
agtcgatttgaatctactcaagtgtttctttttgacagtaaatgcatattcagatatagattggcagggttgtctagatgttataagatctacaggaggcctttgctgtatttttttattacagtctcatctcttggagtacaagaataatctactatgtcgagatcaagtactaaagtagagtgctagacttcgacgaatgctataacagggatcatgtgggatcaaatcctattgaaggagttagcgattggaagtctaaagacaacacatatgtcgtgtgataatgagagcaaaatcttccaaatcatgtgttctatgcgacaactaaacttataaaggttgattatcatttttttacgagtgaaagggttataaagaagctttagattgattttatataaagtggagatcatattgcagaaagcttcaccaggctcttttggtgcgtcagctagaaattttaagtacaatatcaaattaggaagttataattaaggacggctattaagaactggttttctcgtatgataagttatagatcaattatgtaagaacatgtatcaacttcgaagtccatcccgtaagagattgaaacttatataaaaattaaaaaaacattgaccctttaaaaatatacaatgcttctcgccgtttctaattttttgagccaaactactagttacatatttggctcgctacatctaggagactgggcgcgcatgcactaccaccttcacacacagtagcataaagcttccccacttccaggcgaattgacagcccagccgttccctaccagggaagcattctgcaagtcgcgccattggtagcagataagcctgattccactcgacgccgagcttgcccttccctgacggcgagggcgagctgttattcttcccagctggacgacttctgatcagcctgatgcatgaatacaaacagtagctctcccgtccagactcaccagctgctccacgccttcagcggcaccagcacgcccaacccactcgctgcgactggaaagcaacctccaacccgggcaatcaaagccacaatgtcaggttgtcacttgcaggagatcggagaaaagatttctggaagtcgactccaaactgcatcacgtccacatggttctgtaacactacagggtaccaccagcaaaccatcaatgatacagaccgaaggggaccggaagaaccagactgaaattttggaacacagcaagttcagaaacttcgtatcgcagcttaagccatgaactcatcttcatgacaacagattattgccaggacttttgaaaccaacaacagattatgacaaaaaccttcacggcatcgtttcgtgtttcaaccgtgcgaagagtatgacactttattccttttctacactcgccatttgtacattccatacgacaacatggcgtgaacatggacaaggaacctctatggcgacaacaggatactgggcctactacaacaggctaagggcggtaacctaggcttctgttctgtcacgagctatgcgcttccacctgcaagcagctgctgctgctgcccgagctgcccacgtggcaggagaggtcgcgcacctgcagcttcatgttgcgtgagctgatcgagtccaggacgtccatgcactcctggaggtcggcatcgttcgccaggatcacccactcgtcctcatcgtccttgtatttgagctggaatgctccagccgtcagcttgaacctctttgctatctcttccagcaagtggtaccagccccttgctggcacaaacttgaaccggacggtgtcgccattgtaggtagctttcacggtcagtgcagggctgcttcggtctttgagggcacgtcctgggttccccttgaaagtaggctcgcttgaggcgctgccgctcgaagaatcggtcatgccagaggtggaagggagtgtctgctccttggtgtcatgaccatcgaccatagtgacatctgcttgttgcacaaatggtgagttccttactgttgtttggccttcaatgccatccatgcttgggtggagggaggtcagagaatcgatgttgcctgtttctccagtatgcagagaattaacagcaccaatgggattgggatatgaaggaccatgtgtgccttcagagtttgaatgctgtgtgatatttgcaataccagaaacatagtttcttctgcctttgttgttgtttgccaacgtccgaacttcatcgcctccccttttaggtataccagaaacatgaaattggctagtttctctttgccacccatcaggcgaagagaaatcttgttctgattttgggctacatgtttcctccactgctctcccaagagatgaagtaggcaatgtatcgcaagcagagaatggcatcttttccggaagagaggttgcaggaacaagagacccagtagcaggatcgtactgcaaggatctatccacaccgtgaactgatttaatgaccttctctatcttcttcaatgaacgattgaccttgtttatctttcgagatggccatcgggaaattccatgttgtctgcatattcgtttcaatgtcgttggacaaacaccaaggctcattgcagcatccctcaggctcccagagaagtatttgcgaagaacatccagactaaagttcttttcagatgcactgcgctttttatctgcaactcgcattgagcttctctgtgccttgtcaggttctctgtctccttgtttgtcacccaaagatagatcctggagtgcagattctgtgattggctggtcatcatgtgaggaactttcagagttaccagttggtaaacaagttccactagtcttctcatacattgctgcagtagcactaacattttcaatctctgcctcagagactgttcgcaagcttttgcatattctttgcattgtgctggaaaggttgtttaataacatctgctgctctccacagcccttgcagttgactgggagaaagaattctagtatgtagtcatcgtaactggtgtacgtactcctcagccggatggctacagcagcgtgcagaccaaacttacgagcatggtgtgcaagcgggtagtcttcgatactgtactctcttatatcaggtgagaagaatggcagattggatttaagggctcggcctgcaataccctgccccttctcaagatgacgatcagcacatgcatgaagaaacccctgcatctttgcatcgttaacatagcaagctgattcatggatacgaagtgctgcttttcctggttgcggatctatcccgatattctttccaacacaaaaaccattagcgatgccatttgatgtagggacccatgtaagggccaaaggaagcatgtgtgcatgacaaatagctcttagaacatccaatatctcagtaaaagcagatttctgattttcagagtaaaccttctgattgctgcgatctgttgttgtctgcaagttcacagcctgcaaggcatcgcaaacaatgtccatctctgcatcaaaattaggtttctccttgtttgtgacaagttcaagaactgcacaacaagagcccttgctgggatcgtaaactggcatagcaagtgacccttgtatttcatgaagaagagcatgctccattctcaaatactctggcttactgtaatagataacacttgaggtccactctggcaccccagatatgaagaccctccctggaagccctaggtgcagaccaggctcctccttaactgaaaacaggaaatttctagaaacttctctgtaacctgcaagatcctggtcaagtaaatagggctgctcagatgtactcaacacgacacgaccattgtgctcaacaggcatccagacttgggcaagaacaccatcactcaatgacttcctgaacaaagatagcgccatgagcatcctgtctgcaagagcgttgccaacagacctcggaatgatgctactcccttgctgtgagccattacttggaagaacaagcccatctgactcttttagccctctgtcgactccagttggactcgatgctgctgctgagttgaacctttgagcaagtgacgatgtcccgtccacaggcccaggaaaggtgtcaaacgacatgtcttctctcacagctgaagcacgcggagatgagcccaaggatgaccacatggcaaccatctgttgcgcagcggagggatcattcagcagggagaatatgtgatcagcaactgatgggctgcagagctccgagtatccatcaaagctcgtcatggcagcaacaccaaagggatcatcaaaagattgcatggggctgccgatgttactgttgcagccggcacggttgggaggcgtaggcacatccatggctttgctccactcgtcgaggcaaggatccttatccacacctagtacgccgaaatggatttggagcactgtattgagctacagacaggatataaaggagagcactgtcttctagctgaacagaatctttgtgcaaacacaagaagcaatttgatatcccggcccggccggcgtatctggctatctgcacaggagacaacttttcttatgcagaaatgtcctgttcataacgcaggtagtagacaaaaactccaagacccgtcgatcagcaatgaactccggaacccaaaaggtcaagcctttagaggaaagttcggcaaaggtaattgcttaaagcggcttcacagttcctcaaaattcaactttggcactagaaagactgtacggcaggcaagttcggcgccaacggcgatgaacctgcaagctagaagcctctttcgacaggctgaaattaagcaccaattggatcaaaagaaagccaaattcacaccagcacacacctcccggcccctagaacacagaaactccgagcacagccttgaagactgaaactccggcaccaggcggaaagaacggcgctgggaccaccgctcgccttggccgagccactagaccggctggcagcctccagactctcccaattctcgcctacaaaattattgcaacagcggacgcgtgaaa

SEQ ID NO: 5138 - DNA, 1848 bp, Zea mays
  misc_feature (1830)..(1830): n is a, c, g, or t
  misc_feature (1845)..(1846): n is a, c, g, or t
ggccgctttttttttttttttttagcaaagtcgaccacaaattcacgacaatttcatgtacagacagaaggaactaagttgcaggtaatacaaattttgtcaataaccaatcaaacttaagtcttttttttttttttttgctggaaagaaaacttattttatttcaagtaaacaatgatgcaaattgcaataaatcacatgctctcaagaaaaaacaaggatattcgacgcgttcacagctctacactctaatgaaaactaaacaacccctctggctatgcacacaactttcttcccgatggcactgccccatggccatgaaatgaacacaggcttctacaaatcctttttggatgattgcctgcctatctagagatacactcttgatgcagcatggaaaactggaggaagacactacctacctagcaggcgcgaacctcagtgaaccggcttgaagctggctcacagttgctgttactaagtttgagggagccaaagaggcaggacaatctcctcatgatgggactgcgagtggctacttccaacgacaccgcatctttcctggtaccaatataagtatcatagccctcaagatctgcttctgttacgaggactgcatcggtgcacccagacccagtggggctggctggcctaggtagcataatttgataaagtggtaagccactatcttcgcagtcaaactccatcacgtggtaatcatcatttcctgttgtgttcgtacagccagcttcaatggcttctaggaaacaggccaggtttgtactccgtactggaagttgtccaccggtgagagctccaaatgaattaacagcctgcaaaattgtgtggattgtcatagtgtcttaacgccagtagtattgtactaataacttataaagcaatcacaaaagactgcatacatgccactgcgagggtgccaaaagcactcgaggcctaatggatcgtacatgatccaaagctgcttcaggggtcatgttcctgtatttaatcaagtagcacaatacaatagtggtgcttcgtcctcttccagctttacaatgaacatatgtagtaccgccttgtgatgcattccgatggatgaaatctatggcttgagaaatatcctcgagtgaaggtgcaaagaggtaatctcttgttggaattaccaggtgctcaatctcattagcctggtataaagatgttgggacaagagtttcataaggttcattcaacgttacaaccccttgaactccaagctgcttcaaccgtggaacatcacttgggaaaggaacagcgcccagcaaaataaactggtcgacgcgatcccaccaccggaagtccgcctcgaaccggttgcgcaagacgttgtagagcagcgtcgggtagaacagcaccctcgcgccggcgccgacgagcgcgtgcttcgccttaagccgcacgagctcgccgctcgcctggacctcctcctgctgctcttgctgaaacaccaggcccgcgacgtcgtcaccatctcccgattcgcagatcctcatttcccaccaccgcagcagcagctcgcgaatcctcgcgccgagacgcctccagcgtccgcctccgcttccacaacgagaagatccgtggaggcacggaagagggagggaaatcggtggatcgagacagtggggtagccttgctcgcgaccgtggcctggggacgcgagaaatgggacgagtgatttttgtctaaaaccccagcagcagaaggcggaatggcggaatgcggaaacaggtggcacggattgctgattcgggccggcctcgaggtaccctttgttttcctctttttttgatngtcacctcccggccnngg

SEQ ID NO: 5139 - DNA, 878 bp, Zea mays
cattgggtacctccgggccggccggggctcaatctcctctccttgtccactggcttgggcgtgcctttgcgtgcgacgggagctaggaatccacggcatcggaaaagtggccgcctgaagaaccgatttctccaagatttttttgtccgtcctatcgcttgcaggatcggattcgccgtctctggccatggttctcgccggcctccgccggcacgtcggccagttcttgaccagcagtaatgagcttatggcggcgtcgctctcggccgtgagctgcgcggacgaggtgcagaaggcggagggggcggggtgccgtgacgacgccgcggcgctgcggctcaagaaggtggccatggcggcgatactggtggccggggtgctcggggtggtcctgccgctcgcagggcggaagcggcgcgcgctgcgcacggacagcgccgcgttcctggcggccaaggcgttcgccgccggggtcatcctggccacggggttcgtccacatgcttcacgacgccgagcacgcgctgtccagcccgtgcctccccgccgcgccgtggcgacggttcccagtccccgggttcgtcgccatggccgctgcgctagccacgctggtgctcgacttccttgccaccaggttctacgaggccaagcatcgcgacgaggccgcgcgcgtcaaggcggccgccgccgcgcgccctcgttccgacctcctctggagggtaattgcgcgccgaggacatcaccgtggtcaccgtcgacgaggacgagcgcaaggccccgctgttgcaaacgcactgccatggacacggtcacagccacagccacagccatgtgcatgagccggtgcaagtagagggtagcgagggggaggtgtcggcg

SEQ ID NO: 5140 - DNA, 2969 bp, Zea mays
caagataaccatactcccagtgacacctttttcaatatatattctcttatactgcaaacataatgaaaaaggtgtcactgggggtatggttatcttgctagatctgctagtgcccgttctgatggcctccttttgctttgtggtggaagggatgccaatagtgtgccactatcaagtgcatatgggcttgctaagcatagagatggacgctgggagtgggcaattgcccctggtgtgtctccatcacccagatatcaacatgcagctgtttttgtcaatgcacggcttcatgtctcaggaggggctcttgggggtggtcgcatggtagaagactcctcaagcgttgcagtattggacactgctgctggggtttggtgtcacaccaaatctgtagttacaactccaaggacaggaagatatagtgcagatgcagcaggtggtgatgcttctgtagagctcacacggcggtgcaggcatgcagcagccgctgttggtgatttgatatttgtttatggaggtttaaggggaggtgtgctgctagatgacctcctagttgctgaagatcttgctgctgctgaaacaaccagtgcagctaatcatgcagcagcagcagctgcatccacaaatggacaaagagaacctggtagatatgcctacaacgatgaacaatcaggacaaactgttacagtttcaagtcctgatggagctgttgttcttgggactcctgttgctcctccggtcaatggggacatgtatactgatattagtcctgagaatgccattatccagggacagagaaaaatgagcaaaggtgttgattatttggttgaagcatcagctgcagaggctgaggcaatcagtgctactttagctgctgtaaaggctaggcaagttaatggtgagatggagcattcacctgatagggaacagtctccagatgctgcaccaagtaccaagcaaaattcaagcctcataaaaccagatgttgctcttgtcaacaattcaacagcacctcctggtgttcggttgcaccatagagcagttgtggtggctgcagaaactggaggtgccttaggtggcatggttaggcagttgtccattgatcagtttgagaatgaaggtagaagggtcatttatggaacccctgagaatgcaactgcggcaaggaaattattagatcgacaaatgtctattaatagtgtgcccaaaaaggtaattgcttctcttctgaaacctcgtggctggaagccccctgttcgaaggcagttctttcttgactgcaatgagattgcagatctatgtgatagtgctgaaagaatattttcaagtgaacctagtgtcttacagctgaaagctcccattaagatatttggtgatctgcatggtcaatttggtgacctcatgcgcttatttgatgaatatggcgctccttcaacagctggagacattgcttacattgattatcttttcttgggagattatgtcgatcgtggtcagcatagtctggagacaatcagtcttctccttgcactgaaggttgaatatcctcacaatgtacatttaattcgagggaatcatgaagcagcggatatcaatgctctttttgggttccgaatagagtgcatagagagaatgggtgagcgggatggaatctggacctggcaccgtgtgaacaggttatttaattggcttcctttggctgcactaatagaaaagaagataatttgtatgcatggtggtattggtcggtccatcaaccatatagagcaaattgaaaatcttcaaagaccaattaccatggaagcaggctcagttgttctgatggatcttctgtggtctgatccaactgagaatgatagcgtagagggactcaggccgaatgcacggggccctggtcttgttacctttgggcctgatagagttatggagttctgcaacaacaatgacctgcagttgattgtgcgagcacatgagtgtgtgatggatggctttgagcgattcgcccaaggtcacttgatcactcttttctcggcaacgaattactgtggaacggcaaacaacgcaggtgcaattttagttctcggaagggatctggtggttgttccgaaactcatccatcctttgccgcctgctatcacgtcacctgagacctctccggagcatcatattgaggacacatggatgcaggagttgaatgcaaacagaccaccaacaccaaccaggggccgccctcaagcccccaacaatgaccgaggctcccttgcctggatataacaggctggccatattattaaacaattgatttcttgtctcctatcattggcttgaggctaaaattatccatccattctggacacatggaagcactctgctgaaagcacacactggcccaaaacaatgtcgaaagaaaactgttcagggagcgagactaagcggtgctctgaaggcgaaggccagagaagagtcactgtcgacagcgctccccaaatcctttccacaaacaagtagaagagcagaaccaagtgttggtaaaccacaggatcttgcctgggatcgcgcctgtacatactcagacgccagcagatagaggaggggttgtgtatgtgttctttttgtcttagcgtcgaaagggatagcagcgtccattgtactaggtattcatttgctgtagattttgatttgttgcctcatgttgcaaagtatggagtgggaaagttggtttcctcgtgtgacggacggtggtctgtcaggtcttgtataatagcgttgtcggctgtttatgtttgcagcgagtcagctgttacttagcacaccttacacctccctcatgttgtaattcccatcaccggtgctgatgaatgtgcacaatatattgttgtctgttgtccaaagttttgggtcctggacgggttaggtgatttgatttggtttattggagaagcaatacgttgtttgattttgaaaaaaaa

SEQ ID NO: 5141 - DNA, 1520 bp, Zea mays
ctgctctcgaaagaacaaccgaacaaacatataacagttctaaaagggcataccttctaggggtaaatctgactacctaatcctaaccactaatctagtgcttgaataaatgagatctcttttggcgaagaggtgatgtttcacaacagattgcatgcagatcccgcaccatctgtacaagatcatgcatgcatgcaatggtccatccctgccagaccagaaaaagatcagatggtcggcgactgggatctggagacattcacacaatggttaatatgaaaaggtaggttgcccgtacagggcaacactcttttttttttttttttgcatgaatacaacattcaatacgtagaatcatgacagtacaatgcatgcagtcaggacgatgaattgtgagccgctgcaagagtagcttagagaatgaattcacccaggccacagcaaaggatagtcgtcttacatgtcatgtgtccctgaacccaaactgaatgagaaaggatgttattctatagcggttggtacagacaatgtctctccagtgatatttcttcattttgttccttcgtatctttacttgaagcccatagcttgtctgaatccactatcacattgaaacctaggggacagatgaccaaaaagcaagccaagaactagggacggagctgctggagggctgtaccacctaaaggtacaatgttatcagctctgaagtatttgcagcgcctcctactcgtctggctttgaggccaagatcttgcagacgggcatggtctcgtttttactcagcaacttgagcgatggatggacgggaatgtcatgcatcaataccctatctccgacatcaagatttgtcaggtccacctcaatttttggagggatgtgctcagctgggcagagatacaccaggctggtccttattttctgcaaaaagcctcctttcttcaacccagggcaagcatcctctcccttgaactctacaggcaaatccaccttcagcattgttccttcatctgccttcaccattaccaaattcagtatattcccagaattttcatctctatgcaccttgatggggaggacggtgccggcgtggaggatggcgttggatcgctcgcccgcgcggacctggaggcggacgggggtggagaggaagtagggcgactgcttgagcatctccgcgagctgcctcctgtcggcggtaaggaggtgccggtgggcaattccgttccctggcgcggcgcccgcgagcgtgagcaggaccgccgggacgcggccgtggcggcgctcgcgcgccgcggcgcgcgggccggctgtctcccgcggtacagcctggatcgtgtggtggtacgacgcggaggccgtccgccgccatggcgccggagacgacgcgcgcagcgccgccgccccggtggcggcggcggcggccttgccgcgaaggaactgcgccattctcaggttctgggttttggtcgtgctgggctttggctggagcctggagggatggcaatcccggccggcct

SEQ ID NO: 5142 - DNA, 2341 bp, Zea mays
ttgggtacctcgtggccggcccgggcggcatttcgcatcgttcaattcagaatctgatacatcagagaagggccacagcacagagagagactgtctgccagtggacgcgagggagcgcctccgcctcagatccaacccccaccgatgcgagctccggcgatgctccgctgggccgcggcggcgctcgcggcgctcctcgccgcctcaccggccgccgcgttttacctacccggcgtggcgcccaacgacttccataagaaagatccacttttggtgaaggtgaataagctgacatccacgaagacgcaacttccctactcatattactctcttcctttctgtaaaccaaacacgatagttgacagtgcagagaatcttggagaagttctgcgtggtgatcgcattgagaactctccttatgtgtttgagatgggggaacccaagatgtgccagattatctgcaaagcaaaaattgatgataaacaggcaaaggagcttaaggaaaaaatagaggatgagtatcgggtgaacatgattcttgacaatctcccactagttgttcctattgcaaggcaggataggggtgctactgtttaccaggctggatatcatgttggtgtcaagggccaatacactggtaacaatgatgagaagtcctttatccacaaccacttggcatttttagtaaaataccataaggatgaaactacagatctctctagaattgttggatttgaggtcaaaccattcagtatcaatcaccagtttgaagggccgtggaatgataaaaacactcgtttaatcacatgtgatcctcatgccagcaagcttgtggtaaactcagatactcctcaggaggttgaagccgggaaggaaatcatatttacctatgatgtaggcttcgaggagagtgatatcaagtgggcttctcgctgggacacctacttgttaatgatagatgatcaaattcactggttttctattgtgaactctctcatgatcgtactcttcttatctgggatggtggcaatgattatgctccgcaccctttatagagatatctctaggtacaatcagcttgaaactgaagaagaagcccaagaggagacaggatggaagcttgttcatggagacgtattccgccctcctgcaaactccgacttactctgtgtctgtgttgggactggtgttcagttcttcggtatgctactagtaaccatgatctttgctgttctgggtttcctttcgccatcaaaccggggaggactgatgactgccatgctgctcacttgggtcttgatggggttgttcgccggatatgcttcttcacgcctgtataagatgttgaaaggatcggaatggcggagcatcaccctgaggaccgccttcctgtttcctgggattgctttcggtattttcttcatccttaatgctctaatatggggggagaagtcgtctggcgctgttcctttcaccacaatgtttgctttggtcctcctctggtttggtatctcggttcctcttgtatttgtcgggagctatctgggcttcaagcaacctgccattgaggctccggtgaagacgaacaagatcccaagacaggtccctgagcaggcttggtacatgaaccctgccttcaccattctgattggtggcatacttccgttcggagcagtcttcatcgagctcttcttcatcctgacgtcgatctggcttcaccagttctactacatctttggcttcctgttcctggtgttcattatcctcatcatcacctgtgcggagatcacgatcgtgctgtgctatttccaactgtgcagtgaggactacctgtggtggtggaggtcctttctgacctcaggatcatcagcaatctacctcttcctgtacgccgggttctacttcttcactaagctacagatcactaaggttgtgtcaggcatgctgtactttggctacatgcttcttgcctcgtttgctttctgtgtgctcaccggtacgatcggcttctacgcctgcttctgcttcacaagattgatttattcatctgtgaagatcgactaggcatgttccatgggcctgcagcgagtatgcccattgtgtgttttttttcatgaattttcagtgcagctgtacttttggtgttagcttataaacaatttatgctcactgtggttcagagttgtacaaggataggacactactgctagctttatatggggtaattttaacttgtgctgttgagaactgctgcatacgttcaatccatagtctcgttatcgtctgccaccaatttcctgcttcagctgcatgatgatgtccccgcgtgcttggcttcatc

SEQ ID NO: 5143 - DNA, 3850 bp, Zea mays
gtcgacccacgcgtccgctaggatcaaaaccgtctcgccgctgcaataatcttttgtcaattcttaatccctcgcgtcgacagcgacagcggaaccaactcacgttgccgcggcttcctccatcggtgcggtgccctgtccttttctctcgtccctcctccccccgtatagttaagccccgccccgctactactactactagcagcagcagcgctctcgcagcgggagatgcggtgttgatccgtgccccgctcggatctcgggactggtgccggctctgcccaggccccaggctccaggccagctccctcgacgtttctcggcgagctcgcttgccatggagggcgacgcggacggcgtgaagtcggggaggcgcggtggcggacaggtgtgccagatctgcggcgacggcgtgggcaccacggcggagggggacgtcttcgccgcctgcgacgtctgcgggtttccggtgtgccgcccctgctacgagtacgagcgcaaggacggcacgcaggcgtgcccccagtgcaagaccaagtacaagcgccacaaggggagcccggcgatccgtggggaggaaggagacgacactgatgccgatagcgacttcaactaccctgcatctggcaatgaggaccagaagcagaagattgccgacagaatgcgcagctggcgcatgaacgctgggggcagcggggatgttggtcgccccaagtatgacagtggcgagatcgggcttaccaagtatgacagtggcgagatccctcggggatacatcccatcagtcactaacagccagatctcaggagaaatccctggtgcttcccctgaccatcatatgatgtccccaactgggaacattggcaagcgtgctccatttccctatgtgaaccattcgccaaatccgtcaagggagttctctggtagcattgggaatgttgcctggaaagagagggttgatggctggaaaatgaagcaggacaaggggacgattcccatgacgaatggcacaagcattgctccctctgagggtcggggtgttggtgatattgatgcatcaactgattacaacatggaagatgccttattgaacgacgaaactcgacagcctctatctaggaaagttccacttccttcctccaggataaatccatacaggatggtcattgtgctgcgattgattgttctaagcatcttcttgcactaccgtatcacaaatcctgtgcgcaatgcatacccattatggcttctatctgttatatgtgagatctggtttgctctttcgtggatattggatcagttccctaagtggtttccaatcaaccgggagacgtaccttgataggctggcattaaggtatgaccgggaaggtgagccatctcagttggctgctgttgacattttcgtcagtacagtcgacccaatgaaggagcctcctcttgtcactgccaataccgtgctatccattcttgctgtggattaccctgtggataaggtctcttgctatgtatctgatgatggagctgcgatgctgacatttgatgcactagctgagacttcagagtttgctagaaaatgggtaccatttgttaagaagtacaacattgaacctagagctcctgaatggtacttctcccagaaaattgattacttgaaggacaaagtgcacccttcatttgttaaagaccgccgggccatgaagagagaatatgaagaattcaaagttagggtaaatggccttgttgctaaggcacagaaagttcctgaggaaggatggatcatgcaagatggcacaccatggccaggaaacaataccagggaccatcctggaatgattcaggttttccttggtcacagtggtggccttgatactgagggcaatgagctaccccgtttggtctatgtttctcgtgaaaagcgtcctggattccagcatcacaagaaagctggtgccatgaatgctcttgttcgtgtctcagctgtgcttaccaatggacaatacatgttgaatcttgattgtgatcactacattaacaacagtaaggctctcagggaagctatgtgcttccttatggaccctaacctaggaaggagtgtctgctacgtccagtttccccagagattcgatggcattgacaggaatgatcgatatgccaacaggaacaccgtgtttttcgatattaacttgagaggtcttgatggcatccaaggaccagtttatgtcggaactggctgtgttttcaaccgaacagctctatatggttatgagcccccaattaagcagaagaagggtggtttcttgtcatcactatgtggcggtaggaagaaggcaagcaaatcaaagaagggctcggacaagaagaagtcgcagaagcatgtggacagttctgtgccagtattcaaccttgaagatatagaggagggagttgaaggcgctggatttgacgacgagaaatcacttcttatgtctcaaatgagcctggagaagagatttggccagtccgcagcgtttgttgcctccactctgatggagtatggtggtgttcctcagtccgcaactccggagtctcttctgaaagaagctatccatgttataagctgtggctatgaggacaagactgaatggggaactgagatcgggtggatctacggttctgtgacagaagacattctcaccggattcaagatgcacgcgcgaggctggcggtcgatctactgcatgcccaagcggccagctttcaaggggtctgcccccatcaatctttcggaccgtctgaaccaggtgctccggtgggctcttgggtccgtggagatcctcttcagccggcactgccccctgtggtacggctacggagggcggctcaagttcctggagagattcgcgtacatcaacaccaccatctacccgctcacgtccatcccgcttctcatctactgcatcctgcccgccatctgtctgctcaccggaaagttcatcattccagagatcagcaacttcgccagcatctggttcatctccctcttcatctcgatcttcgccacgggcatcctggagatgaggtggagcggggtgggcatcgacgagtggtggaggaacgagcagttctgggtgatcgggggcatctccgcgcacctcttcgccgtgttccagggcctgctcaaggtgctggccggcatcgacaccaacttcaccgtcacctccaaggcctcggacgaggacggcgacttcgcggagctgtacatgttcaagtggacgacgctcctgatcccgcccaccaccatcctgatcatcaacctggtcggcgtcgtcgccggcatctcctacgccatcaacagcggataccagtcgtggggcccgctcttcggcaagctcttcttcgccttctgggtcatcgtccacctgtacccgttcctcaagggcctcatgggcaggcagaaccgcaccccgaccatcgtcgtcgtctgggccatcctgctggcgtccatcttctccttgctgtgggttcgcatcgaccccttcaccacccgcgtcactggcccggatacccagacgtgtggcatcaactgctagggaagtggaaggtttgtactttgtagaaacggaggaataccacgtgccatctgttgactgttaagttatatatatataagcagcaagtggcgttatttacagctacgtacagaccagtggatattgtttaccacaaagttttacttgtgttaatatgcattcttttgttgatataatttatactttgtggagagttgctgacagacgagttttgtatgctacgaaaaacaaagaaattagtttgcattctttcactttggtgcatctccatgagaaatt

SEQ ID NO: 5144 - DNA, 1985 bp, Zea mays
ggccctaggggcctttttggcttttttttttctcattttttttttcttttctatgcctggcctagcaattctctgaaaagctttattacatgttcatcgagtcgtaactcgtaacaccgtgtctcaccagcaagcggagcgcccatacaaggtaaataacgtatggtcgccagatgaggttttcagagcctaagaccaggaccttttctgagcctacaaacatccagaggtacatgctcgaaatgtcatgagcagcatgtgtgttttgttacattgtaaaatcaagcctctgggagcttgaagatggctccgaaaggtttccagaagtccacctcttcagcatctccagagcagccttcggttgatccataggtaccatgtgaccagcatcgtgaaccttcaagaaactcaaaggaccgtggctctttagaacgccagcttctttcccgtcgactgtgaagggcttctcggatgaggacacaaaagcttcctttccagaccattccatagagtttacccaccttgagttcccaagccagttacatatgaggtcatactctccagcataaatcaacactttgatgtcgctctcaaggagttcagggattccaacttcaaggttcctcatccaatctaatagcatggcctcatagacagttgggctgcatgaaacaaactctatatctccaacccctaggctctctctgacagatttgaggttgagaaatttctccaaattagagaaatcatagcataggcttccgatgcatggtttcctgatgtcataataatttttattgcctatgattgtcctgatggcactgaatattgtattgcagacaaagtacgcagcaaggcaagatacagttccagaagtaccacaaagcttgaccgcgaattcacaagttggaactattttattgatcctgttaaattgtgtttttgtaattaatcccatatccaatgcgtaatcagggtatgccttgtactgtattgctggatctgttagtccgttgccaatagcaaaacccttcaagttaatgtgaatgccctcattgttcttgtttccctggtgcacacgacttgcaaaggcaggaatgtaatgcccagcatatgattccccagttatgaagaaatcatttttagcatactttgggtgctcagcaaaaaaggcctgcaggaagtcatatagatcattgctaatagtagcttcgttgtggcgagtgtcacgcgaatccgagctgtaactaaacccagttccagtgggctggtcgacatagataagatttgatgccttgtcccaaccaaaatcattccagacgagcgacaagttgtccgctatgttgaaggggccgttctcgtagaagagcgcgagctcgctgctgcagccgggcccgcccgtgagccagatcaccacggggtcgtccttgtggcccctcgactcgaagaagaagtagaacatcctggcgtcgtgggtgttggggaggcggtaataccccgcgtggtggccgaggtcctccaccgacgtggcggcgcctccgttcgcgaaggacgcgatgcggatgggcctctcgacgagggtccccgcgggggcgagggcgccctctacgccggcggtggagaggggaggggacgcgtcggcggggtggaggttgagcgcgtggatcaggtcgacggccgcggagcgggggaaccggcgcggagacgaggaggggaggcggaggatgctcccatatccattctcccacgagccgccggcggcagcgacggaggcaacggccaggaggaggaacgggaggagtagctggtcggcgggccgcatgattggtccggcctccggcgacatatggcgatgtggggggagtgaatcagaagcgggggcggagtcttccttcaagagagcggtagcgcgagaggagccagccgccgcgtcactggattttgctcgggccccaccgcccacaccggccggcctcgaggtaccc

SEQ ID NO: 5145 - DNA, 1765 bp, Zea mays
  misc_feature (22)..(22): n is a, c, g, or t
ggtcccgggtcccccccttcgngacccccgccctcggccgccgcgcgccaacagagcaacgcccaggcacacacgacgcggaccaggcaaccagctgccgagggaggaaccctagcggaacactgtgcaggtgacggcggcgcgctaccggtgacggcggcgcgctaccggtgacgggggatacggtggcatcgtccccctcggcccctcttccatccccggcgcggcggcgccagcagccggcctgcagggcttatattttacggtgagcacattcttttgctgatggagaccactgaacctctacaggatatcatgtgtgagtttcgtgctggtaagatgtctcatgagggaacacgagtggttccagacacgcgcaagggtcttgtccgcgttggtaggggtgaagagggattagtccattttcagtggcttgaccgtggacagaacatagttgaagatgatcaaatcatctttcctgatgaggcggtctttgagaaggtgacagaatctcctggaagggtttacatcttgaagtttaagcaagacagcagaaaattcttcttctggatgcaggaaccaaatgctgatggggactcccagacttgcatgcaagttaatgcctacataaatcgatcattagatgctgaggctgatcttcgagtacctattgaagcagaaatgtctgaagatacggctgatgatgatatctcttccagagctgggaatctagttgagagcatgaccgctgatttggctggtgaagtgacgtctgctgctggacctgtacgcttggaggatctgcagagaattctgagtgcaatacagtcatcaggtgctgcagctgaccctgatgctggagtaggactaggagacatcttgaagcctgatctggtcttgccattaattgaggacttgcccattgaacaattggcatcacatcttccggagggtggctcatggagtcctggtgatatcgttgagcttctccaaagtcctcctttgcgccaacaattagatgcattcacccacgttctgcggactgggcagatagatcttgctcaatttggagttgaccctgacaaatataagttcacggtggtgtcgttcctggaggcattggaagactcggttggaagaggtgcttctgaagctggagacaaggatgcagaggtcgagcgaggcagtggaaatgatgccatggacgagagttgatatccgtgtactaggtgtctgaattcatacgtgacaagtcttgtgttgttgttttgggtagaacgctagctcatagtattttgggcttctggcacacagaaagcaagtttctggacaagttttggacattattgctgctgtgagatgtagtgctaggcaacagatggtctggttggtggatcatggattccatggcattgagaagcttgcaaggctagattgattgtgttctgcgggggtaaatcttgcgtggcgttttgaacgtggattggtaaacagaatagcatcttttgaacgtcggttgttccatgtccacagctgatggtggtggcctcgaatgtcgtactgtacgtccatgtcgatgattccgtcgcaggagcctactactactatatccctgttctatgtaagatatgtgtactccagtacaaacagtatatggacagctcaggatttttttatattgttctacacatacatctttagatgatttttaaaaaaaaaaaaaaaaaaaaaaaaaaaaaaaaaaaaaaaaaaaaaaaaaacctcg

SEQ ID NO: 5146 - DNA, 2001 bp, Zea mays
cccctgttcccagaggcggcagggtgggcgaccagtctcctccgcacgcttcccaccgagctcacacactgcacactcccacactcccactcccacctgtaggttcacgggaggcgaggaccctgccccccctgcattcttcccgtatcgcggaccgatcctcgccgcgggaggcgagcggagcggggcgtttctgcgggggagaagcgcgtccctgcaatttctgagagaggggaggcggcgagtggaaaagagcaggcgttgctatcctatcttgctgacacagcggcggtgtggcgaggcgcatggcgagggcgcgcggtggcgccgcgtggtgggtgctggcagcggcgtgggtgctgtgggcggctgcggctgcggcggaggcggaggccaggtcgccgtcggcgaggagggtgcaccggcacctcaagcgcctcaacaagccggccgtcaagagcatcgagagtccagatggagacatcatcgactgcgtgcatatctcccaccagccagcgtttgatcatcctctcctcaagaaccacacaatacagtttaggccggcgtaccaccctgaaggtctatacgatgataccaagagcagcataggctcaaacaatgctggcgagaggccgatgctccagatgtggcatcgaaatggcaggtgccccgagggcacggttccaatcaggagaaccaagaaggacgacctgcttcgagctagctccgtgaggcggtatggcaggaagcggcacactgctccgaacccactgtctgttgatcccaacatgctcagcgagggtggccaccaacacgccattgcgtacgtccagggcgacaagtactatggtgcaaaggccaccattaatgtgtgggagcccaagattcagcaggctaacgaatttagcctgtcccagctctggatcttggggggttcatttggggaggatctcaacagcatagaggctggctggcaggttagccctgacctctatggagacaacaacaccaggctgttcacatattggactagtgatgcataccaagccacaggttgctacaacatgttgtgctctggtttcattcagataaacagcgaggttgccatgggggctagtatcttccccatctcgaactacgcgggctcccaatatgatattagcatcctgatctggaaggaccccaaggaaggaaactggtggatgcagtttggcaaggaatacgtcctgggctactggccgtccttcctcttctcctacctcgcggacagcgcgtcgatgatcgaatggggcggggaggtggtgaactcggagcccgacggcacgcacacatcgacccagatgggcagcgggcacttcccggaggaagggttcagcaaggcgagctacttcaagaacgttcaggtggtggacagcagcaaccagctcagcgcccccaagggcgtaggcaccttcaccgagcagtccaactgctacgacgtgcagaacggtaacaatggggactggggcacctacttctactacggcggccctggcaagaactcgaactgcccgtgactggtgcttctaatgtgtagtgtgaagtgccgtcaccactagcaaaatgtaacccaagcgttcaggttcgcttatacagcgtcaatctgcatctccttgttcagtcctagctaggtagtgtgtaacatgtgcatgtgctctctagactctaatgttttcttcttcttttcattgtattttcttcttgtgccatgtaaagtttctgaagagaaggagcatggcttgaggctgcggtgggtggttgggctggtcggtggtgacctctactgatttttgcgaagtctgcttattggtcaccttcgccagttattttgaaagtgtgctatagcttgtttgatgatgaatgatagtaatgctgtaatggtattgagcttagtggttattattgcatccagttaaaccacccccggcggggtgttaaaaattcagaaattgttgataagct

SEQ ID NO: 5147 - DNA, 2880 bp, Zea mays
attttaatataggatagagagagtatttttttaagacgagtggattgacatatttgatggaaatatatacattaaatattgtatggagatacacaaataatggggtgtttttttcttaacttgatcgatcagcctatattcatgtagccgaagctgggaagtggggatgtggaatacagccaccgacattttgttcacaatgtccgaaaaagggaaagaataactttttcctttgctcatttggcaaaaatacacgcaacactgactcctgtgcatcggctctgcaggcgggccctacaaatactccctgcctcccctgctttcttccacccaaatttgcttcccagatctgccgccgcacccccaacccgtggcaatcaatccccttcctcgcttcgcaaatggctcattccaacggcgcggccgccactgccactgccggcggcggcgacgtggacgacgagaccgccccggtgccgcgggccctcgcgccggcgcggaaggtggcgctgatcacgggcatcacggggcaggacgggagctacctcacggagctgctcctgtccaagggatacgaggtgcacggcctcatccgccgctcctccaacttcaacacgcagcggctggaccacatctaccacgacccgcacgcggtgccgtcggccccgcgtcccccgatgcggctccactacgccgacctctccgactcctcctccctccgccgcgcgctcgacgccatctcccccgacgaggtctacaacctcgccgcgcagtcgcacgtcgccgtctccttcgagatccccgactacaccgccgacgtcaccgccacgggggcgctccgcctcctcgaggccgtccgcctgtcgcgcaagcccatgcgctactaccaggccggctcctcggagatgttcggctccacgccgccgccgcagcgcgaggacacgcccttccacccgcgctcgccctacgccgccgccaaggtcgccgcgcactggtacaccgtcaactaccgcgaggcctacggcgtattcgcctgcaacggcgtgctcttcaaccacgagtccccgcgccgccggcgagaacttcgtcacgcgcaagatcacgcgcgccgtcggccgcatcaaggtcgggctgcagaccagggtcttcctcggcaacctctcggccgcccgggactgggggttcgcgggggactacgtcgaggcaatgtggctcatgctgcagcaggaacagccgggggattacgtcgtcgccactgaggagtcccacaccgtcgaggagttcctgcaggctgccttcggctacgccggcctcagctggaaggatcacgtggtcattgacaagaagtacttccggcctgcagaagtcgacagcctcaagggggacgccaccaaggcgaggaaggtgctcaagtggaagcccaaggttgggttccaggagctcgtggagatgatggtcgatcacgacattgagctcgccaagaaggagaaggtcctggtggatgctgggtaccgtgatcccaagcagcagccatagaaacatcacagttgcttcttgctctgttggggctcggattcagattgttcccctcatacatggtggttctcaggggtagaggttgaccgaagttactatcgatatttatcctggtaagaaataaggattgttgcagtatgatcttacagtgtgttcatttagttttctgactatgttatgtgctttaatcgaatgaatgaataatccgtgccaatttggtatttggaagaggatgatatgcctgcctgattgcagctgttgatgttaagagcaaaagtgtcctcctgatagcagctgcttcagtttgtattgttccacttcagctactcccacacttgttctgatacatggcagaaaagctgttgtagggacattttgtaagttgaatcagtggcaaatgcatccaacaacacttgcagttgaagaggggaacaaacaaaaggaaacaaaaaatagcacctaactctacctctacctgtgcagggagagcaattttaccattattatcaatggatttaccatgttggagtcacttgagttctcaatcttggtatgccgtgtcacttgagtcccccatcgtgcctcgcctcccctgtcacttgagtccccgaatgcttcaacgtgacacgtcacgtcgtcatctggtttggataaatccggtgttggatgattttgcttggatcggctaagttagatgatccgttttgctcattttctgagttcggtgacccaagttacacatcgtgtcaagttccagagccgttgctgcattttactctataatgtttatatctgtttttataggtttaattttataaaaaagtgtattcagtcacccccttgtgtggccatcggtaaggacaaaagacggtgagaagacaacatgatgaacaatgggagactaggacatctttgattggtgcctagtttgcatgtctaaccatagttaaagtacaaacttttgataaagtttgtcacaaaaatgagtcaacgacatgtagtacatggtgctttgaaagtggtgcatcattgttgttaatacgtgacaccatgataaagggtaccagagaaaaaaatacagaggtgtaggtctggaaccgctagcgctgacatgacaatatgcatacaacaatgtacggtgtagagaggtttagactcggtgtatatgtttatatgcaagtacgaacaaagcatatatacatagatcatgactgagctagcaaatgggaacaactcatgaatgctaataatcttccctggtgtctgtagtcgccgatcatcccgagatacgatgaggcgacaagaggggaaaatggaagccaatcaattttttgctgtcaaata

SEQ ID NO: 5148 - DNA, 2086 bp, Zea mays
gaagactataaagcaagctgtggactcgaggctcgccggccgccacagcgcagcaatatgctccaatgcaatcatgcatgcagggacaacagttgataccttcctcagagaaaacttggaatggctaggtagggcaaccaactgggccaagttcagtgccactgctggactaggcgtcattcacaggggccatcttcaacaaggccgcgcattgatggctccctacctgcctcagaatggtgctggtggtagtggtagcccatactcggaaggaggtgccctctatgctcttcgtttgattcatgccaaccatggtgaaggaatcaaagagttccttcgtgagagtcttcgcaacaccacttctgaggtggtccagcatggtgcttgtctgggactcgggcttgcagcattaggtacatcagacgaggaaatatgcgaggacatcaagaatattctgtacacagatagtgctgtggccggtgaagcagcgggtattggcatgggtttgctcatggttggcacggccagtgaaaaggccacagagatgcttgcttatgctcatgatacccaacacgagaaaattatcaggggtttgtcacttggaattgcattgacagtgtatggcagggaagaagaagctgacacattgattgaacaaatgactagagatcaagatcccatacttcgttatggtggcatgtatgcattggctctagcatacagagggactgcaaataacaaagctatccaccagcttctgcattttgcggtgtcggacgtgagcgatgacgtgcggaggaccgctgtgttggctctcggcttcgttctctacaacgagcctgaacagacacccagaatcgtgtccctactgtcggaatcatacaatccacatgtccgttacggtgcagctctagctgtcgggatctcctgcgccggaacaggattaagtgaagccatctccttactggagcctctgacatcagacgtcgtcgactttgtacggcagggcgcgctcatcgccatggcaatggtgatgatccagaccaacgagtcctacgatccacgcgtcggagcattcaggcgccagttggaaaagataatcctcgacaagcacgaggatgccatgagcaagatgggcgccatactggcttcaggcatcctcgacgccggtggcaggaatgtcaccatcaagctcaagtcgaggtcaaagcacgacaggctcaccgctgttgtcgggctagccgtcttcacccagttctggtactggtacccgctcacctacttcataagcctcgccttctccccgacggccctcatcggcctcaactccgacctgaaagtgcccaagtttgagttcctgtcgaacgcgaagccgtcgctgttcgattaccccaagccagtgacccagcagaccacagccacgtcagtcaaggtgccggcggccatcctgtcgacctatgccaagtccaaatccagggcaaggaaggacgcagagagcaaggccaaggcgaaagcagaggactcttccagtgcttctacttcgatgcaggtggacggcgcttctgctgctggtgctgctgcagagaagaaggccccggagccagagcctacgttccagatcctgacgaacccggcccgggtcgttccagcccaggagaagttcataaagttcctggaagacagcaggtacaagccggtgaaggctgccccctcggggttcgtcctcctgcaggacctcaagcccacggaggccgaggagctcgccctaaccgacgcgccgtcaaccgctgccacgacaagcaccccggcatccagcgccggcgagccggttggcatggctgtcgacgacgagccccagccgcccccggccttcgagtacacgtcataaataagggtggtgatcgtcggatcaggatgtgtgggttgggttgtgttgtctgtaggaacttcgtactggtgttggatggcgcgcggaacccgggcgtaccactaagctcatttatttaacttgaaaatatattttttttttccaaaaaaaaaaaaaaaaaaaaaaaaaaaaaaaaaactcgagggggggcccggtacc

SEQ ID NO: 5149 - DNA, 1331 bp, Zea mays
agaaattacgcatatacttggaagtggtatgtccaacaaaatgtgggaaacccttgtggagcatgccccgcccggccccttaagtggaaaatattacatatactattctgatgagactagaagtattggtgctattcgcaacaacatctatgcattctgtgggttgatttctggcgagcagttttattcatctgagagtcttgatgatagccaaaagctgtttgctgatgcattggtaaagaaagcatatgataactggatgtatgtcattgaatatgatggcaaaggtcttttgaaccctaaaccaaagaaaaagtctgcatccactggtcaagtggagacacatgctctgcgggttggcccgttggactattcaaacaataccatgtcttcgatggcatgccagggccatcaccatcaggtggaactgattctgcagggtatggcgtcgaccaaagcgcaacacatccatctcagctgcagagttcatccgccaatgtccaggcaccatatgatgacacattttcgttcttaccacctaacatgctgacagggtctgcaaatgatgccatgggtctggaactgggccagttgcagcaagtaacttctcaaggccagacaattcagccagcaaacgtgggatatggtgattggcccaggaaccgtgacagtcagtatcctgatgacttcactgaggacattcgcgttaagagccaccagttgctcgagggcgaggacatgcagcagctgctgagggtcttcagcatgggtggagcttctggcagtttgccagacgacaccttcaatttccagtcctacatgccctctccgttgcccaacctcgggttcgaaactgagcgtagccattcgtctggcaaagctgttgttggctggctcaagatcaaggcggcgatgaggtggggaatcttcgtcaggaagaaagctgccgagagaagggcgcagctagtcgaactggaggattgacaccgtggctttacaatggtcaaggttgccttgtagattactagtagttatctgcccccataccttcctgttaccgttgaaacaagtttctgaaactcttttctgaaatgtacaacgagtagttctactattttcttgtacagaattcaccttgttttgattgtgttagttgtggaacattgctctgctaagtttgacacatgactggacccgtatgcttgtgtatcttattttccatagctcttcagtgcagaatgtaccgcaacgatgcgaattaatccaaagattatgtgtacatgttgatgccttgcctttaaaaggcccccagggccaaaaagtcgacgcgg

SEQ ID NO: 5150 - DNA, 2305 bp, Zea mays
  misc_feature (1243)..(1265): n is a, c, g, or t
  misc_feature (1373)..(1377): n is a, c, g, or t
gcaaagcttccaggttgggctctcttggtcatctggtttgggaaggggctccaataagcaggctccaaacttcaatggcttggctgctttatcaagcaatctaaatccttcgagccgtgctgctgcccttttttttttttttttttttttcaacaaaatcactaaactgaatcaggtttcaaacaagcaaatacatgcagtctcaaatgcgacctttcaatacataggttcagaacatttgcggcagggctaaaaacataggcccacaggaagacaaagtaatgtagtgaggaatataaggtggtctatggcatccacacgggtcctcttaagcaaagcttccaggttgggctctcttggtcatctggtttgggaagggactccaataagcaggctccaaacttcaatgtcttggctgtttttatagtacgtgaggggagcaggggtggcaaaggtgaaaataacaggtccatcagatagctgctttatcaagcaatctaaatcctaataaccatgacgctttccatagtgaagagaactatgaccagataacccactattagaggagcgagcactgtacccgctgtaagccccatatcctcttccaggtgcctgggagccgccataacttgcatagctgtcagaaggaatcgtgtcatccgatgtacgaaaaccacttgaatatagatagtgcccaacaggcttggtgtctctgcctagatattttggttcatccgaaacaccagcaggcaaaggatggtaagggataacaggtggaaatgcagataaagagccctctctttcaaagaaattggctttcagccttgtagctatttgcacaagagcatttcttgcaacatcaaggcctccagtgatctgaaccatctcatcatcttctgctgctacctttggaacattttcttttgaaagaatacgtacattggctctggatgttctccgtatctcagtaatgattgagccacctttgccaattaggcacccaatacgtgatgttgacaccagcaagcgtgtagtatatgactgctcagccaattctaaatcacttttctcgctgcatctaggctgcaaacgaactgcagcatcaattgttggagatacaggatcttcaaagaactctttcgcagaaactgtaattatgcagtcatcatcagggtctgaattggagctagccactttgattaaagccccagactcctgcctaatctgtttgataattccaccnnnnnnnnnnnnnnnnnnnnnnncatttgcagcagcacaaagtaaacgcaagctaaactcctttgcagagctctcatcccttcgtggttggtataaagagggccaatctcctgctacatcacctttgtagnnnnnataaggaggaattactggagtgatccctacaacaggtgcagtagaggaaccaccaaggtggggtgctccctggataaggttgggtcaagctggatgcaagaagatgctgtgacttggatgggttgttatggaggcgagatgacacttgatgaagagcctttctgacaactaccgtgtccccagatatctggagaagttcgtctccactaatggcacatgcggggatatgatcattactaaggacacgtatttgtgcaccagtctcactgcggattccttggatgatctgcccaccttttccaataatgcatccaatctggtctgatggcacaagcaagcgaacagtaacttgaggtgaaatttcttcgctgtcttcgttcccaagaccctcatcactggcaagcctctcatgaactctaaagagggcatcctgagcagggcaaacctcatcttcagcaccatcgatggtattagttttcctgcttgtgctaaatatggtaacaactcgctcatcacatccagggacactctcgccaatcctgatcttagcttgggtctcagtcctcaactgctttgcaatttctccacccctgccaatgatactcccaatttttctagaggcacagaggtagcgatacacagtgtcatcaggaccaggtgcatatgtatcatcgccaggatttcttctcttactgcctccattttcagtaaaatcagactggcgctttccatgactgtttcggtggccagccattatctcggcggtctggggcagcgtcgcgagagagacgatgcggcccttgcggcggaacgatagatgccgccgtaaccaggagcttgcgaaatcgaggaggacagccgggcagggggaggctagggacaccgatcgacgaagagcgcggccgggccggcccggaggcccggcccg

SEQ ID NO: 5151 - DNA, 3827 bp, Zea mays
  misc_feature (480)..(480): n is a, c, g, or t
  misc_feature (515)..(515): n is a, c, g, or t
  misc_feature (568)..(568): n is a, c, g, or t
  misc_feature (649)..(649): n is a, c, g, or t
  misc_feature (787)..(787): n is a, c, g, or t
  misc_feature (964)..(970): n is a, c, g, or t
ctgctttctccagtgagccgcacccgcacccccccgggcccggattaaccacaagcgaccgtcgccttcccccacctcctcccttcctcaaaaaaaggcggaggcgggagtggtggtggtgctcgtgggcacgcagcggagcaccctgtacagcagcagcgctgcggcagtagagagtgccattggtggagctggtaactagccctcccccctccgttcccgtcccgcgcgcagccgtctgccgagcctgctcagtgcccatcatggtgaggaagaagagaactggccctggtggctctggagaaacttctggagagtcttcaggagcctctggacaaggttcctcacagcagcctgagcgaactcaacaacctgggggaggacgtggctgggtgcctcaacagggtggccatggtggtgggcaacaccagggtcgtgatcgacattatcagggacgtggaggaccagggccacatcacncttggtagtggggcacctgagtatcacccgcgtgnaataccagggacgtggtggtgaatatcagggacatggtggtgagtaccagggnacggggtggtgactaccagggaacgtggtggtggccgctccagaggtggaatgccacagccatactatggtgggcataggnggaggtaatgttggacgcaatgttcctccaggtccgtccaggacagttcccgagctgcaccaagccccatatgtccagtatccaggccccgggtggtttcgccctccccatcgggacctggctcatcctcacagcctnatggcagaggtgagctctggacaagtccagcaacagtttcagcaacttgccgatcgtggtcagagttccacgagccaagaaattcaggtggcaccagcatcaagcaaatcggttcgattcccgttacggcccggcaagggcacttatggggacaggtgcattgtgaaggcaaatcannnnnnngctgagcttcctgacaaagaccttcaccaagtcccccccccccccccccccgaggttacttcacgtggcgtcaatcgtgctgtcatgggtgagcttgtaacaatatatagacaatcccatttgggtgggcgtctacctgcatacgatggaagaaagagcctgtatactgctggaccattgccatttacttctatggcatttgaaattaccttgcaagatgaggaagatagtcttggcggtcgccaaggtggacataggcgtgagagagtatttagggtggtgatcaaatttgcagcccgtgctgatctccaccatctggctatgtttctagctggaaggcaagcagatgcccctcaggaagctcttcaagtgcttgacattgtactacgtgaattgcctaccgcgaggtattctcctgtcggtaggtcattttactctcccaacttagggagacgtcaaaaacttggtgagggattggaaagttggcgtggtttttaccaaagcataaggccgacacagatgggccttttcactgaatattgatatgtcctctactgcatttatcgagcctctccctgtgatcgattttgttgctcagcttcttaacagagatatctcagttaggccattgtctgattctgatcgcgtgaagattaaaaaagccctaagaggtgtgaaggttgaggtgactcacaggggaaacatgcgcagaaaatatcgcatttctggcctcacctcacaagcaacaagagagctatcattccctgttgatgatcgtggtactgtgaagactgtggtgcaatacttcatggagacttatggttttagtatccagcacaccactttaccatgcttgcaagtgggtaatcaacaaagaccaaattatctgcctatggaggtttgcaagatagttgaaggacagcgttactcaaagcgactcaatgagaaacaaatcactgctctactgaaagtgacctgccagcgccctcaagagcgcgagctggacatcttacagactgtgcatcacaatgcatactatgaagacccctatgcactggaatttggtataagaattgatgaacgtcttgctgcagttgaagctcgtgttctgccaccaccaagacttaaataccatgatagtggccgagagaaggatgttttgcccacagttggccaatggaacatgatgaataagaaaatggttaatggtggcagagtgagcaactgggcatgtattaacttctctcggaatgtgcaagatagtgccgctaggggtttctctcatgagttggcagtcatgtgccaaatatcaggaatggattttgctcttgagcctgtgctgcctccagtgactgcaaggccagaacatgttgagagagcgttaaaggcacgttatcaagatgcaatgaacatactgaggccacagggaagggaacttgatctgctgatcgtaatactgcctgacaacaatggttctctttatggggatctcaaaaggatctgtgagactgaactcggattggtctcccagtgttgtctgactaaacatgtttttaagatgagcaagcagtaccttgcaaatgttgcactcaaaataaatgttaaggttgggggaaggaatactgtacttttagatgctttgtcaaggagaatcccccttgtcagtgacagaccgaccataatatttggtgctgatgttacccatccacatcctggagaagattccagtccttccattgcagccgttgttgcttcgcaagactggcccgaggtcacgaaatacgctggactagtgagtgcgcaagcccatcgccaggagctgatacaggatcttttcaaagtatggcaggacccgcagagaaggacggtaactggcggcatgataaaggaacttctcatttctttcaagagggcaactggacagaagccccagaggatcatattctacagggatggtgtcagtgagggacagttctatcaagtattgctgtacgaacttgatgccattagaaaggcctgtgcgtccctggagcccaactaccagcctccagttacttttgtcgtggtacagaagcgccatcacactaggctgtttgcgaacaaccacagtgatcagcgcacagtcgatagaagcggaaacatactgcctggcaccgtggtcgattcgaagatttgccatcctactgagtttgacttctacctgtgtagccatgctggcattcagggaacgagccgccctgctcactaccatgtcctgtgggacgagaacaagttcacagctgacgagctgcagaccctgacgaacaacctgtgctacacgtacgctaggtgcacccgctccgtgtccatcgtgcccccggcgtactacgctcatctggcagccttccgagctcgcttctacatggagccagacacctctgacagcgggtcactggccagcggtgcccgtggccccccacccggtgcggcacgcagcagcacgagaggggccgggagtgtcgaggtcaggcccctacctgctctcaaggagaacgtgaagcgtgtcatgttttactgctgagacgctggtgggctgccttcgccaaggaaaatgccctggagcattcccatgtacccgcactgtttcggtgatacagtactatctaacgccgattttgcgcgttaagacttccagtgatctgggaaatttcttgtacgactgttgtagtgttgtgtattcgtaatgtgatgacgcggcagttgtaggagcttagtgccgtgtaaagtatctgttgtaagttgtaaccagtcaccctctagtgttatgtcatgatgaaccaaattatttgttgtcaaaaaaaaaaaaaaaaaagccagt

SEQ ID NO: 5152 - DNA, 1900 bp, Zea mays
  misc_feature (1895)..(1896): n is a, c, g, or t
  misc_feature (1898)..(1899): n is a, c, g, or t
atgaagaaaaattatttttgttttaataccttaaaaattagacaatataccactttattatgtatttatgaaaactataaaatatttgtcattttatctttttgagagtatcgttttggaatagccgacaaacccggtctcatagttcgaccgctgattttcgttttgttctgttcataaaatacgaaaacaaaaataatgtagatgttttctcatcattttcgacagtgcatcgactttaacctctggactggacacgtatctcaagtttcacctcacaggacagagggacagacacacgccccgaagggccagaacaaacgttccatagcccccagcattgtcacatgactcgcattcgcatggacccacccagccacgccccatgcccacgcgcgccccacgtgtgagactgagacgccagatccatccaacggttcgtgtcacaccacgccaaggccgcacgcaccgcggacgggtccacacgccagagactgaagctggcaggcataaactgtggggactggggagctcgttctctccgccggcccgctcactctccctggtctctcgtctcctccactccaagagaacaggcgccggcgaaaggcgggagcagcgcgctgcccattcaccgccccctgatttcttgggagttgcggatcggtctccggggcagcgtggaacggctgggcccctcggatcgccggagatgctgccctacgcgacggcggcggaggcggaggcggcgcttggccggcccatgacgcccgccgaggcgctgtggttccggtacaccgcgggggtgtccgactaccacctctactgctgcaacatcctcttcctcttcgtcgtcttcacggtggccccgcttcccatcgcgctcctcgagctccgggccccggccgcggtctcgccgtacaaactgcagccgcgggtgcggctctccagggccgagttcgtccggtgctacaaggacgtcctccgcatcttcttcctcgtcatcggcccgctccagctcgtctcctacccggcggtcaagtttgtgggaattcacacgaagttgcctttgccgtcccttgcggagttggcagcacagctactggtgtacttccttgttgaggactacctcaattactggatccacaggtttctccacggggagtgggggtaccagaatatccaccgtgttcaccatgagttcactgcgccaataggattcgcagctccatatgcacactgggctgaggtgctgatactcggcatcccctccttcgtcgggccagccattgttccaggccacatgatcacattctggctctggattatactccgtcaggtggaggctatcgagacacatagcggctttgatttcccattcaccccgacaaagtatattccattctatggaggagcagaataccatgactatcatcattatgtaggaggccagagccaaagcaattttgcttctgttttcacttactgtgattacttatatggcactgacaaaggttacagattccacaaaacatacctagcaaagctgaaggatctggggcataatgatggccagaaaggagacggcagcggacccagctacgtgaaactggattagattgcaagatatagtgcatcttgagtgtttctatggtcatcgacttcactgtggcatttcgaaatgggatattgctgagttgggctggtcacgtgtgttctcatttctgtagcaggcatacagctttcagctctgccttcttctttcttttttttttctagcgtttatgaaattctatggaacttgtacgctgacgaataacaacgcaactctcacgaataacaacgccaattcttaaaaaaaaaaaaaaaaacacaaaacaaaaggagcggggagnngnng

SEQ ID NO: 5153 - DNA, 2655 bp, Zea mays
cacaccacgtctcctccgcctgcgtctgcgtcccttcctccgcggacgccctcctaaaatccccagaggcccgccttgggaacatcccctccggccagcaaaccctaaccccatcccgcactcccccctcccccaacacgcgcgcgctttcttagccgctaagcatatccctccccgccacgatctcgatggtggagatgtctgtggtggagctcaggacgctgccgctcggcttccgcttccaccccaccgacgaggagctcgtcacccactacctcaagggcaagatcaccggcaggatcaactccgagtccgaggtcatccccgagatcgacgtctgcaagtgcgagccgtgggacctcccagataagtccctgatccggtccgacgatcccgagtggttcttcttcgcccccaaggaccgcaagtaccccaacggtagcaggtcgaacagggccaccgaggcgggatactggaaggctactggcaaggacaggataatcaagtccaagggcgacaagcgcaagcagcataccatcggtatgaagaagaccctcgtcttccaccgtggtcgtgcccccaagggcgagcgcacggggtggattatgcacgagtaccgcaccaccgagcctgagttcgagtccggcgagcagggtggttatgttctttatcgcctcttccgtaagcaagaggagaaaactgagcgctccagcccagaggaagtggatagaagtggctactcacctactccttctcgttcttcacctgacaacctagaggcgaatgaggaagctaatacaccattaaataaggaatctccagaatctgctctgcatgaaagcccgattgagctgccaaaatctgttgaaaccaatggtggttcaatgacaaggtggctggcggacagaaatggtaacttgatggctaatgcaccagatgtttcccatatacctttccatggacatgctgctggtgtagctaaggttgatccttctgttggtgcttcaggccacttagttaatccccacaatggaaatgatgattataacaaatttgtgtctgatttcacccccattctaccacttgaaaatgcattcttcactgatatacaacaaggagcttttggttttgatggcatcatgaatcctcttgatccccttgatgctttcttgaatcaaacacttgttgatcctgatgaacattcatcaacaacatcaaaagttcagtatgattctgacattccaacagaatttgagaaccattggaatatgaaggttgagcctcaagatgatcaatgctggtgggcaaacataggatttgagccagacgaaccaaatcctctgcttccttgtgacaccactgaccaagacatactttctgttgactctggtgctgattccttcaatgagcttttcaatagcatggaagagactggaattactgttaggcctcaacagttggactccactgtgcaaccaaaccatgtgttcgctagccagggcaatgcaacacggaggctgcggctacaggttgagtgtagggagatcataactaaagatgagagtgaagatgaagtatcatgtgttctaactccagactgtttgaacgattctgttgaggagtccactgcagagaaggatgtggcttctgatggggatgaggctgagtcaacagggattgttattagaagccatcaccctgctccaagatcaagctcagagaggtcattcactcaacagggaactgctatgcaaaggctgcggctacagtcaggccttaacaaaggccagcgtcctagtactgatgattcatcaagctgcattatagacgaaccaggaagtcagcacaaagcagaaaaagcagagattgaagaggatgcgagtacaaacctcgctggaagtgctgatgatctacctggtaatatccatgatgatgagcaaaagaacatccctgaacatggtgctgaaatgacttctccagaagccaaatctgttctgaggttgcggaagacttctgaggaaggcaacaaggatgtcaagcaggagagttgtctcgagccacacgtgagagcaccaatgcagaagggaggcttccaatcatacatcatctggctggttcttccggtggctctgctcctgcttctctgtgttgggacatatggatgggtatgaaatctatcctggtgcggtgcaaggcatgacattttgcgcacatgggttcctggcgtcaacctggtgtgcggtcttctgtacataacctgtggcatcctttcaacagccgtaccctgcagtaagacatcccggcattgccaaggcagctgaaaaataaataaaaaaacaagtggtagaaatgacaaggtggaaaagagcgaggtgtgttattgttggttttagtacatcgtagtcttcttttgctgttgttgtagatgtcttgctaatgttgtcgctgttgtgtagttgcaattcaagcccagggctgccagttttatttcctaatgtaatgtagcaagagcgagaccctgttagacgggtgcgctgaaattctgaacctctgtaatatctgatgttcttgtggatacctgtttcagaattttcggttcctgaacccagttactgatggcttgttgatcaaagaaaaaaaacggccaaaaaaaaa

SEQ ID NO: 5154 - DNA, 2687 bp, Zea mays
acgtacgcggggggtcgagagacggccgtctgctcagccgtcgttggcgacggctcgtttcagggtcccccacctactaatcacgaccctggcctctctcgattctgttgccttgccattgccatcatccaccctcatgcatgtcggtgcaacgcccatgggcatccactggtgcttatagtgcggccctcccgggccgggccggggaggacatcctcggccttccagggcagcaaccacgaaagccttctgcgcggggtgctttcctcgcagcaaatattcctgccttttgcattccggcttgcaagttccttgctttgggcagatatattgtgaggtctctatatataggtggttcgaggtgatcggcagaaccacacaggcaaagatggcgagcgtgcacaaggccaccacccttgttctcatgttctgcctgctagcgctggggagagcggagtacctcaagtacaaggacccgaagcagcccgtcgctgttcgcatcaaggacctgctgggtcggatgactctcgccgaaaagatcggccagatgacgcagatcgagagggaaaacgccacggccgacgcgctggccaaatacttcataggtagcgtgctgagcggcggaggcagcgtgcctgctcctcaggcgtctgctcaggcttgggccgccatggtgaccgagatgcagaagggcgctctttctacgcgtctgggtataccgatcatctacggtatcgatgcagtgcatgggcacaacaacgtctacaaagctactattttccctcacaacgtcgggcttggagctaccagggaccctgacctcgttaagagaattggagaagcaactgctcttgaagttagagctactggaattccttacgcctttgctccctgtatagcggtctgtagagatccaagatggggacgttgctatgagagctacagtgaggatccaaaggttgtccagtcactgacttcactcatctctggcctgcaaggtgacgctcctgcggattccgcgggaaggccgtatgttgggggaagtaagaaggttgctgcatgcgcgaagcactatgtcggtgatggtggaacgcataacggaatcaacgagaacaacacgatcatcgacacacacgggctgctgagcatccatatgcctccttactacaactctatcatccgaggtgtctccacggtcatggtctcctactccagctggaacggagtgaagatgcacgcgaaccatttcctggtcacggattttctcaagaacaagctcaagtttaggggttttgtgatttccgactgggagggcattgatcggatcactactcctcctcacgccaactactcttactcaattgaggctggtgttggtgctggaattgacatgatcatggttccattcagatacacagaattcatcgacgatctgacgacacaagttcagaacaaggtcatccccatgagcagaatcgacgacgccgtctacaggatccttcgtgtcaagttcaccatgggtctgttcgagaacccttaccccgactctagcctcgccggcgagctcgggaagcaagaacaccgggaactggcgcgcgaagccgtcaggaaatccctggttctcctgaagaacggcaagtcctcctacgctccgttgctgcccctcccgaagaaggccggcaagatcctggtcgccggcagccacgccaacgacctgggcaaccagtgcggggggtggacgatcacgtggcaaggaagcagcggcaacaccactgccggcacgacgatcctctccgggatcgaggccaccgtggaccccagcacgcaggtggtgtactcggagagcccggacagcggcgtgctggccgacaagtacgactacgcgatcgtggtggtcggggagccgccatacgcggagacgttcggcgacaacctgaacctgacgatcccggcgcccgggccgagcgtgatccagtcggtgtgcggggccgccaagtgcgtggtggtcctcatctccggcaggccgctggtggtggagccgtacctgggcgacatggacgcgctggtggcggcgtggctgccggggtcggaggggcagggcgtggcggacgtgctgttcggcgactacgggttcacggggaagctgccgcggacgtggttcaagtcggtggaccagctgcccatgaacgtgggcgacgcgcactacgacccgctcttcccgttcggcttcggactcaccaccaagggcacgaagtgagtgagtgtgaggcgctctgatgggatgtggcctgtgagtgagctgtgtattcgtgggcgggcgtgaggctctttggctttcgaattggttgggggtgacgggcggcgagtcgtgtacgccgcacacattgcgcagcgtacgttgggttgggatgtttgcgtctgggtaataacagtgatgcattcttgagatggttgctgttagtgtgggttgtttggaatgaacaataagatcaggcgcgttacattggcacgctactacctctcctgctgagaccagagatggcgatgtgcatttacccatcggcccgtgctattccataccctatttagccgtgtactgataaaagaatttgtcaaaccgtgtacgggtaaaatcatgtatccatgtactgctcactataccgtatacgccagctacttctactacc

SEQ ID NO: 5155 - DNA, 1310 bp, Zea mays
ttgggtacctcgaggccggccggggacgtggcagcggcgtgcccccccaaacgtttcgatatcccagagtggtgtggccgccgccggcggcttctttctccccttccattccgctccccgtgacgtcaccgaccaggcaagcactccgctccaccagagccgcctcgcctgtctgtccgacccacacacctaccggagcgcgcgtcccgaggtcggcggagcagggtcgggaggagggaatggcggtggtgggcgtcctcgcgctgcagggatcctacaacgagcacatggccgcgctgaggaggatcggggtgaagggggtggaggtgcgcaagccagagcagctcctcggcatcgactcgctcatcatccccggtggcgagagcaccaccatggccaagctcgccaactaccacaacctgttccctgcacttcgagagttcgtcggaggtggaaagcctgtctggggaacctgtgctgggctcatctttcttgcaaacaaagcagtagggcaaaaaacaggggggcaggaacttgttggaggattagattgtacagtccaccgaaacttttttgggagtcagcttcaaagctttgagacagagctttccgtgccaaagctttcggagaaggaaggagggaatgatacatgccgcggtgtatttatacgggcacctgctatattggaagtaggtccagatgttgaaatattggcggattgccctgttcctgttgacagacccagcattacaatatcatttggggagggtactgaggaagaagagtattcaaaagatcgggtaattgttgcagtgcggcaagggaacatcctcgcaactgctttccacccagaattgacatcagactccagatggcatcgtttcttcttggacatggataaagaatccccagcaaaggcgttttctgcgctctccctgtcgtcatcgtcaagagacactgaaggcctgccaaagaataagccgtttgatctgcccatttttgagtaacgctaaagacaagacaaaccaaaagattgaaggaacgaagaaactgaccgtatttattatcgatcatcatttagccggttacaaaaacagccagctgagaatctgtcatactcagccgaaaaaagtgttgtctggtagctaacttgtacggataaaaaataatcacgctgtgtgctgtacgcaattctcatcagataaagcgaaacattgttttcctgggaattatagttttgctgaaggtgaccagttgaacacttgaacatggttattctttccccctccgtgcggcttggttcaagagcc

SEQ ID NO: 5156 - DNA, 1670 bp, Zea mays
ccattgggtacctcgaggccggccgggcgacactctgcccagctaagctaagctccctccgtccatcggcatggcgactaccactactaccatcctcctcctcctcctcgtcgcagccacagccgtctcggcggccgacctctccgtgtaccacaacgtgcacccgccgtccccgtccccgctcgagtccatcatcgcgctcgcccgcgccgacgacgcgcggctcctcttcctctcatccaaggcggcctcgtccggcggcgtcacctccgctcccgtcgcctccggccagactccgccctcgtacgtcgtccgcgcggggctcggcaccccggtccagcagctgctcctcgcgctcgacaccagcgccgacgccacctggtcgcactgcgcgccgtgcgacacgtgccccgccggcagccgcttcatcccggccagctcctcctcgtacgcctccctcccgtgcgcctccgactggtgcccgctcttcgagggccagccgtgcccggcgaaccaggacgcctcggcgccgctgccggcgtgcgccttctccaagccgttcgcggacacctcgttccaggcgtcgctgggcagcgacacgctgcgcctgggcaaggacgccatcgccggctacgcgttcgggtgcgtgggcgcggtggccgggccgacgacgaacctgccgaagcaggggctcctcggcctcggccggggccccatgtctctgctgtcccagaccgggagcaggtacaacggcgtcttctcctactgcctgcccagctacaggtcctactacttctccggctccctccggctgggcgccgccgggcagcccaggaacgtccggtacacgccgctgctgaccaacccgcaccgcccgtcgctctactacgtgaacgtgacggggctcagcgtgggtcggacctgggtgaaggtccccgcggggtcgttcgcgttcgacccggccaccggcgccggcacggtgatcgactcgggcacggtgatcacgcggtggacagcgcccgtgtacgcggcgctgcgcgaggagttccggcggcaggtggcggcgccgagcgggtacacgtcgctgggagcgttcgacacgtgcttcaacacggacgaggtggcggcgggcggcgcgccgcccgtgacgctgcacatggacggcggcgtggacctgacgctgccgatggagaacacgctgatccacagcagcgccacgccgctggcgtgcctggccatggccgaggcgccgcagaacgtgaacgccgtcgtgaacgtggtggccaaccttcagcagcagaacgtgcgggtcgtcgtcgacgtcgccggctcgcgcgtcgggttcgcgagggagccctgcaactgagcccctgaatccgtccgtgccctatgcacgggaggaaggaggagacgcgctgcggctgccgcatcggtcggtgtgcagttagttgtcctgttagtctatgctacgttgtctgcactctgcaataacggacgtgacccggggaaaaaaactgtttcgtcacgggtagctagagaatcacgtaaggctcttgttttcgtttgtgtcctataatgtatggctattggcctgtttcgagaggttaaaatttggaggtgctgcatcaaattcataaaaaaaaaaaaaaaaaagcggccaaaaagcggcc

SEQ ID NO: 5157 - DNA, 3060 bp, Zea mays
  misc_feature (3052)..(3052): n is a, c, g, or t
  misc_feature (3056)..(3059): n is a, c, g, or t
gtccgctcgtggcgctgccgccggcggggagcctcgttgtctacttcccgcagggacacagcgagcaggtagcagcatctatgcgaaaggatgcagatgccaaaattccgagctatccaaatctctcatcatctgttttgtctagcgacagtatgcatattggaattcttgctgctgcagcccatgcagcagccaataacagccaattcacagtattctataacccaagggctagtccttcagaatttgttattccttttgccaagtaccagaaggccgtctatagcaaccaactatcacttggcatgcggtttagaatgatgtttgaaactgaagaatctgcaacaagaaggtacatgggaacaataactggtataagtgatatggatcctttaaggtggaaaaactcccaatggcgcaatattcaggttgcatgggatgaagcagcaccaagtgagagacgcaccagggtttccctttgggaggttgaacctgttatcgctccattcttcatttatccctcgccattgttcactgcaaaacgtccgaggcaacctggggtaacagatgatgatagctcagaaatggacaatctttttaagcggaccatgccatggtttggtgaggaggttggcaagagagatctgagtactcaaaacggtttagttcctggattaagtttggttcagtggatgaatatgcaacacaacccctctcttgccaacacggttatgcaaccggaattgctaaattcgttagctggaaaacctgtacaaactctggctgcggctgatctatctaggcaaattagcttccagccccagttcctgcaacaaaataacatccagttcaacacttcgctgctacctccccaaaaccaacagaccgaacagttagcaaatgtaatagctacaccaaaccaattgggaagtgttatagtaccacaaaaggcagttcaaaattgcagttctgaacagaaacagaatctggttacacaaccactgcaagtcagccaaccaatggttagtgtggcacagcctcaacttgtccatactcaactccagcaacctcaagtagttctccaggctcagcctcagcaacctcaagtcattgtccaagctcaactacaacaacagcaacctctggttcaaaatcacaccaccatacaaggtggccttcaacaaatccagcttctgcagcaacagcaagttcagcagtcagtgcaggaacaacagcaaataaagatacagccttttcaggtacctaatgatgccaacatggtaacacagttatctgatcagatgaaaatacaactattgaaggctctacagccacagcagcctctggtcatggaacagcagaaaatgatatttgatttgcagcaacaagcagtaaattctcagtcaactgctcagcagtgctcacaggtagctacccaagtggttggtttgcatagcagtagcactaatcagtacccgacgcagcaaaagactcaacctctcaaaacatttcaagattttcctgggaatgctgtttctattgtaaaaccagaaattgtcacctccgtgggtgctcgctctttgcatgtgcctggtggggtgcagtcaatgaagatggatgaagttccctcttcttcaacatcgccatccacaaacaacaatcctgttattttgcgatcaactccaagtagctccaagaaccaatgtttacctactgcagcaaaggctcctcagtcatctgttgtattgggttctacacttgaacagggtatgaagccttgtgacagtacacaacacccaatggtgattcccaagctggctgaagaaaggccagctactggacaagactacatgaacaacaatcagctggattatttggatacatcatcttcagcgacttcagtttgcctttcacaggctgatggatcgctgcaacaaagttttccaccttcatccttcaatcaacatcaaccgttgagagaagcagttccagatagtgagtttgaggttacagatgcaggaaataactttctatttggggcaaatatcgatggccatatggagcctcttaacgaagacgatttgcttggaactgccttcgaagctgacaagtacatggaacagatgccaggaaacggcatctctaactacatttcatcaaaggattctcagcaagagttatcatcttcaatgatctcacatccatttggcgttgctgatatcgcgttcaattccatagattcatcgatcaatgatatccaattcttaaacagaaattcccgggctccaggtcctgctcaacaacgtatgcgaacatacaccaaggtgcacaagcgcggcgctgttggaagatctatcgacatcaacagatattctgggtacgatgaactgaagcatgacgttgctcgtatgtttggaattgaggggcagctcagcgaccaaaacagagttggctggaaactggtttacgaagatcacgagaaggatgtcctattagttggtgatgacccatgggaggacttcgtgaactgcgtgcggtgcatcaggattctttcgccgcaggaagagaggcaaatgaggctggccagcgactacggagacagctttgttggcaaccaagcgtgcagcagctcggacggaggtcgcccgtggagggtcaccggcgactagaaatagcaggcgatgtctgagcacaaatgtttggtataatccgtccaacgatagcaagaaaatgatacgcgatttctgagcacaaacttttgcactcagatgatcgtgcaaacaattagcattttaagaaaaatgttgcagttcaatgtaactgcaggaatgtctctgatgtagcctcttcgatgtggcagccttaacaatcgatgtgctacagttactctgcctatgtatttactatactacctcggccttgtatatccttttgacgtaggagcagctggacgctgaaccccccggaggctgttagggacaataacaaccgttcataatttgccacagatacagatctgagtggacaaatggattcagtttacgtaaaaaanaaannnng

SEQ ID NO: 5158 - DNA, 2266 bp, Zea mays
  misc_feature (2130)..(2149): n is a, c, g, or t
  misc_feature (2153)..(2157): n is a, c, g, or t
  misc_feature (2159)..(2163): n is a, c, g, or t
atccccggtgcggcgcagcggttcctgcctcgtgcacgtctgtatacaccggcgcccccggcccccgccgcggaggaggggggaaggcagccagtcagccagaggagcctagagccagtcccgtcccgtccatcagccgccacaccacaaacacccaccactctgctctcgcccgcttgctttctctcccccgctccagcttatggcggaggcggcgccagcagccggcggcggcatcggggacatcctcgccacgagcgatcgggacttcctcgtccgcaactccggcgagcaggtgaagatcagcagcgttgaggcgagccctgtggccatctacttctccgcctcatggtgcccgccatgcaggaggttcacgcccaagcttattgaagtatacgaaaaactggcctcacagggcaagagcttcgaggtcgtctttgcttcggccgatcgcaatgaggaagctttcaatgaatactttgcaaagatgccatggttggctgtccctttttctgacagtgaaggccgtgaggcccttgatggccggttcaaggtctctggtatcccacaccttgtcatccttgatgcaaaaactggtgaagtttacactgaagatggtgttgaattcgtgagtgagtatggcgtggaggcttaccctttcacaccagatcggatcaatgaactgaaggaacaggaaaaggcagaaaaggagaatcaaactattcaaagcgtgcttggcacatctactcgagactatctcatttcaaacaagggagacaaggtacccatctctgagcttgaggggaagtatgttggtctttgctttgtggtggatggctttccaccactcgctgaattcactgaggtgcttgctaagatctatgagaaactcaaagaagtgggagagaaatttgaagttgtagctgtatccttggacagtgaagagtcatcatttaatgagagttttgcaaagatgccttggcttgcaattcctcaaggtgacattaagtgtcagacgctggttcgttactttgagcttagttctcttccaacactagttctgattggccctgatgggaagacactgaacaacaatgtcgccgacataattgacgaccatggttttgaggcatgggagggcttccccttcagtgctgagaagctggaaattcttgctgagaaggcaaagattaaagctgcatcacagaccttggagtccattctaatcagtggtcatttagactttgtcattggaaaagatggtgcaaaggttcctgtatcagaacttgttgggaagactgtccttgtttacttctcagcaaaatggtgcccaccatgccgtgccttcctgcccacacttgtcaaggagtacaacaagatcaaagagaagaacagtgattttgagatcgtcttcatctctagtgacgaggatcagagctcattcgatgattttttctctgaaatgccatggcttgctgtaccctgggaagatgaaaggaaagcatcgctgaagaaaaccttcaagatccgtggaatcccttcacttgtcgccatcggacctactgggcagacagtcagcagggacgcaaagtcccagctgatgatccacggtgctgatgctttcccattcaccgaggagagacttgaggagctacagaagaagctggatgagatggcgaaggggtggcctcagaagctgaagcatgagctgcatgacgagcacgaacttgtcctgctgcgccgtggtacgtaccgctgtgatggttgtaacgagatgggcagcagctggtcctacaggtgcgacgagtgtgactttgacctgcaccccaagtgcgcgttgggtgaggaaaagatgagtgaggaagcccctgctgggtatgtgtgcgagggaggcgtgtgcaggaaggcctaatctgaatgctgtgaaggatgacaataatcgtgagatggctgtgctttgatgtgaggtttttcggccgttgatgtttgtgtgttaataaatagtagttgcaggagcatatgtgtgtatgcaaaactatgtgagtattgtgtcagatcaaagtaatggttttgctgcatggtatttctggtcttaatcatatgatgttgttggcatttttttgccttatnnnnnnnnnnnnnnnnnnnnatannnnngnnnnncggccgttgatgtttgtgtgttaataaatagtagttgcaggagcatatgtgtgtatgcaaaactatgtgagtattgtgtcagatcaaagtaatggttttgctg

SEQ ID NO: 5159 - DNA, 3840 bp, Zea mays
gagggggctgcgtaggggttgcgctgcggttagtctgagggtgcgcagctaggacagctgcaggcagccgcacgtgtgtcgacgccctccccccttgcactgcgcacgcctcagtcagtggatgtgcatgtccggctttgtgtatggcgatggcagcaggatagagtagcagtagtctactcctagcctgtttgatcgtgtcggctttgcttccatcagattcatcagaccagatgggtgacatgctctgtgccgggtccgtccgctgcacgagcacgcgtgctatgcagcagctgggaacgggagaataataaaatagtaggcgtctcgcaggattgacgctggctagctttgaccgtatgtctgacgacgacgacgtccaaggctcccagcactccagcagggtatggccgccccccggcccggcacccagccaatgctctcttgccctcttgctgccactttaaaattcgctggtgatgtactcctcctcctacttgactggtcagcggataaacatcgtcagcttcgaccctgcatgttagaaaaaaaaaacgagaaaagagagagagaaatgcttgaccattttgccgtgcatgcatgcatccaccatggatggcaatggcaatggtaatgggcatcgatgagttgatccccctctgcatgctacgtactgatgcttgctgctgctgctgcttgtcgcatcacctggtgacagcttcaggtgggtggcgggggaggaccacatcgtcaacttcccaaccgtgcggctcaagcgaggcatgcccgtcaggctcaccagcaaagactagctagctagtcactacgacctgcttgtgcatgccatgcatgcagatttcagtcacgtcatatgcaatatatattggaccctggaggttgcacgtgtacagaagagaggatgcaggagctagcagatgatcggaggtatttaggcagactgaaattgaatcgaccgcgaagagtagcacactactataccacgagtatgatctgtagtacgtagtaataataagaggaatataatatcattagtgtggtagtatttacttattatactactctctcttttcggttttatttaccgtgttttagtttaaaaatgaactagcgaggttaggcaataggcgtgcatgcatggcccatcatggtcatggatatataggccttgatggttatactagtataagcagtagtgctatgtcacaagggattactgggatctgggatgatgatccacaatcccatctaaaacgaaaagagttaataaagattgttaagtttaccgctgggggcctgggactttgactactactgaaaaatgtttgtcttctcgtattgcatgctgctgtgttgtttgagggcagagagtatagtatatgctgcagaacgtgacgcacagcgtatacacggaggtattagcaaagcgtgagataaggggctggatatataggaaggcaagctgattagagaccgcctaaaataagccctacgtatcgctatcggcttggaaaatcaaatctttttttcacgtttaaactaaatatataaaaaatgctaaaatttttaatagtagagttattttgagatgtggaatatttaaaccgggatttcttatattgttatattagttagatttgaaaaaggaagtactatgtatgtgcacatgtccatggagaggtgaagagatgatgtgatagaaattgatatggatggaacggattgtcggagagtgacggaggcaatccagcccagcctttgcctttgttgcgtgatcctgccttcctgctcctccatgcatcatgctgaagctgaaaaggaagaataggaagaagaaaaaatgctgtccctctacctccacctccacgcggctggtggaaaagggtaaatgcagttgatcccttttgggacgctttcagccttttcattgaatgaagaagaacagatgagcgcagacaaggcccccagtaaactcaggttgcctgccattaccagcagcggccaatcaatccacccgctctcgcgtgtgtcaagatcctctcatggttacgcctcatatataccaaccaaccattagcatacacccacgcagatcatcccctaccaaccgggtcggttccttcggtttctgagaacacattagttcactaatgatggtgatatcgtttaaccactttcacccatgctcgattagctttggttgagtgtgtatgctatgctatgctatgcaatgccccccatgtgcctttatatatgcgtgtgttctcatgctattggaaccttcttgcttcgttctcctctcaggccaggcctctcgccaagacgattgctgctcacgccctttcggcaaagggcaaataaaacccaacgcgaatacgcacgcagtgtctgcctggcccggtcccgctggcccccgccctgcagggccccccctgcatccccagcgcgagcgacaccagcttttgggaacaccgacacagggcagagcgcatgcatgcccgcaccgccgcacgcttgggtggcctcatggtccagccacatgtgggcgtgcccgcccccttgctctgtcctgccggtctgccctgcaccaaagctgcacgcaacgaaaaaaaaaaaaaaaaaaaaatccttcaatggaaaacgctaggctctcatttccggcagcagttcggctcaaaacatggctccaggaagacatcagaaatggaggggcctcaaacatggcatgagtcgtgggcagatacagtacccaacagatcgcacgcaggcacaggatacgggaggtagcagccagcagacaacacaatcaaacagtacacagcattcaaggcctcatctaacagcttagctaggggtggtaatagatcgcgatccaaatgtttcttcacaatcctttgagaccttacttaattttagtttttaaaaatggatagaaatatagtccgaacctaatccgacccttatattccatagtgtaaatttagagatcgttacaacctctacttcccacatgtagtcctttcagaacaataacatcttcagaactaaacacatctctttcttacccatctacgaaaaaaaaatcaactcgcttgattttaccagacagttatgggaacaagcttagtaaaggctttccttctatatcaagagcaatgtaaacaaatggtataatctaaacaacagatgatgatgatgataagatcttcacgcaatcatgcaggtaatttctaaaatccagaagctattgatacagacaaaatccagttttcagcttagcgttgcagatagctccgattgacagatgtattcgatacgggacagcagcgatgaccacaaccccatcttctgccagatccttgcttaccacatgctataacagagctattgatttcagactgcgatttttcagggatgaacattgaattatgctgcattgaagtaaaaaaaaatgactaagcgaaagaggtagatatgggacagggtctgtccttctgaagttcccagtccccagctgacaaggacatttcttatatcttctgaagaactcgagtcagtaataatagtatgatagtagatgcgtgtcaaaagaatcctatgctgggcagacagcaaatgacacagcctgtatagcagtccagcaggaagcatgttcatgaaccattaccaccacatatttcatggagaccccccaaaaaaatcttcagaatatctacctagaagatgtggccataacacacccttccttgatataccacatcctataactagaagttaccttactaccctaacatcaataatggtgtgcattatctgccagct

SEQ ID NO: 5160 - DNA, 2653 bp, Zea mays
tagcgatctccccgcccccccctcgcccccccccacgcgtccgccctgcttcgctgttccctttccccgcccctacctggggcatctgcctctgaatcgcggcggctcccgaggcgccgcctggcgagcgtctaggcgccggtctacggcgacgatggaggtgtgatttggacgggagagagcgtggtggtgaggtctcggttttctcgatataggagatggcggcggcagaggcgcggggaggggagttccccgtgggcatgaaggtgctggttgtggacgacgacccgacgtgcctcgttgtgctcaagaggatgctccttgagtgccgatatgacgtgacaacatgtcctcaggctacaagagcactaactatgttgcgagagaataggcgtggttttgatgttataataagtgatgtccacatgccggatatggacggattcaggctacttgaacttgtaggccttgagatggaccttccagttatcatgatgtctgctgattcaagaacggatattgtaatgaacggaattaagcatggagcatgtgactatttaataaaacctgtcagaatggaggagctgaaaaacatctggcaacatgttattaggaaaaaatttaatgaaaacaaggaccatgagcattctggtagcctagatgacaccgatcgtaacagaccaaccaataatgataatgaatacgcttcctccgcgaatgatggaggtgatggcagctggaaatctcagagaaagaaaagagagaaagaagatgatgaaactgacctcgaaaatggtgatccttcttctacatcaaagaaaccaagagttgtttggtcagttgagcttcatcaacaatttgtgaatgcagtcaatcacctcgggatagacaaagctgtcccaaagaaaattttggaattgatgaatgtcccaggcttaaccagggaaaatgttgccagccatttgcagaaattcagactctacctgaagagaattgctcagcatcatgcaggaatacctcatccatttgttgcgcctgtatctagtgctaacgttgctccgttaggaggactggaattccaagctttggctgcttctggtcagatccctcctcaagctctggctgctttgcaggatgaactccttggtcgacctacaagcagtttggcgttgcctggaagggaccagtcatctttgcgagtggctgcaatcaaaggaaacaagcaccatgaagaaagagaaatagcatttggtcaacccatatacaagtgtcagaataatgcatatggtgcattccctcaaaacagcccagcagttggaggattgcaaccttttgcagcttggcccaataacaaagttggtatgactgattcaacaagcacattgggaaatgtgggcaattctcaaaatagcaatatgctattgcatgaattgcagcaacagccagacaccttgctgttaggaacccttcacaatattgatgccaaaccttctggtgtagttatgccatctcagtcgttaaatacattcccggctagtgagggtatctcacctaatcaaaatcccttgattataccatctcaacccccaagttttgtgtcatcaattcctccatccatgaaacatgaatctcttcttggattaccttcaacgtcaaccagtctgttgggcgggcttgatatggttaatcaagcttcaacaagtcaggctttgattagtagccatggaacaaatcttcctggtctcatgaaccgtagctcaaatgcaatcccttcaccaggaattagtaattttcaaagtggaaatattcattatgttgttaatcagaacgctatgggagttagctctaagccaccaggtgttctaaagaccgagagcactgactcactgagttgtagttatggctatattggtggtagcaccagtgtggactctggcttgttctcttctcagtccaaaaatccacagtatggtctactgcagaatcaaaatgatgttaacggcagctggtcgccttcacaagattttgatagttttggaaattctcttgggcaaggccaccctggtaccacttcatctaacttccagagttccgcccttgggaagttgcctgaccaaggacgagggagaaatcatgggtttgtcgggaaaggcacttgcattccaagccgctttgcagtggatgaggttgaatctccaactaacaacttgagccacagcattggaaacagtggagacatagtgaaccacgacatatttggatttagtggacatatgtgaaactttcttgaatttgtaagtagcgttgatcagtgagcactggaaacaaatctagtggtttgatgaatggttgctagtaatttcgtttcttttttttttcttctgtaattggtttataaagggaataatctatgtggcagcatgtggaatcttactttatagaagtttgttcagttcaaaggacttaaaattggtcagtcccttgtcatatagcttcttttctttgttctctttttctgtaattaccaattgtagcattatttttatgaccgtcgtaattcagcctagtcgatttattcccggccaaaaaaaaaaaaaaaaaaaaaaaaaaaaaaaaaaaaaaaaaaaaaaaaaaaaaaaaaaagggcggccgc

SEQ ID NO: 5161 - DNA, 1354 bp, Zea mays
gccggccgggtccatggcggtctccctcgctctcaacgacgccgcgatccagatccagccaggtatcaagtcatccttccgccgccgcgtactgcgcctatcttgcttctccggcggacgggcgtacccatcgtcctcgatcatcccccggactggatcggaacggagatccagccggacctgcggtgatcccttccttttctcggatagtatagtgagctagccaatgaagaggtaaattcgtcaggcttgtatcaagttagtagttcatggtgcctggatgagcagtagagatgctactggccgtggaaggaggagggttcttctcgtcttcagcttcggggtacagccatggccttgctctcttgctactcggacggaaagctgaggagaagcccgtcaaggcttcgccgtggaaccagtaccggctagtcgaccgggaggccgagcaggtgtaccacctgccctccgccaaggatcaggcgcctgggaaatgtgctccctttgtttgtttcggatgcacggctaatggcctcgaggtggcgtctccttccaaagcggtctccagcaatgcgctcggtaggggtacctcacaggaagaagcatcttgttcagcacacaaggcgttgacaactagtgcttccatcagtggcagtgagagacgtggctgtcttaagagcaactccaaaagggattctttggagcaccgtatagtggtgagcgagggggaagaaccacgcgagtctgtggaagaggtgcagaccttgagatctagcatagaacggaggaaagttcagtggacagatacatgtggaaaggagctttttgagataagggagtttgaaacaagcgacgagggcctgtcggatgatgatgcagaaaacgatggtttccggaaatgtgaatgtgtgattcagtagatttcatctctgcacaacaagcctgacagaaacatctcatgggaagcctgccctgctgggaaagatgtgccacggagactactttgccactgaaatgatcgacgacagtcgaaacaaaacaaacagtcatgaatcgatatcgtgctagattatttgttggttatatgcttaactagtctgctcagcagggttatagtttcgatgcccacctgtacaatatcaagatcccctttctttcttttctgtcacattttatttttctcgctttccattgtgttttcacgcccgctgtaccatatgaggctgccctgttacctcctccagggattttggatccctgacttcatgctgttccattttgttttgctcctgacgtatttagtgatggcttgttgatgcggccgtccaaattggtaacattcattcttcacttc

SEQ ID NO: 5162 - DNA, 2150 bp, Zea mays
attgtgctcgctgcgctgtgtgtttctggataataaaaaacccgccagcccccgcatcggagggccgcgcaagtgggtcaactcgcaactgaagaccaaaggcgagagccggctgcccggattccggaagcgcccaagcccccaacgcgaccgtcgctgtcgccaccgcgctcggctcgcccgcgtccacagaagccgccagggccatacgccgatgaatcctgccgcgacggcggatcccagcagctccagcacctcggcggccacgctgcggaagcggatgatctctatagacacggctcgacgaggagccgacggcgcgtcgcctgagaccgcgcccaggccagatcgggcgggtagtgataaggcgccgcaggagcgggaggaggagggctcgatggcggcctccgcgcctgcggcggcagcagcgagggagagtgacctggaggcggtgggcgagccgatgagccccgcggggcggctgttccgcgagacgcacttcaactgctacatcgtggccgtgatcgggctgggcgcggcggtggacgtcgcggcggcgcgcgcggggctggaggtcacgctcgtccgccacccacgcttctccagcgtccaggtgaatgatggtgatgcgagaaagaacgccaagccgcggtgggtgcggaccacggttaacctggatgatcacatcatcgtcccctgcctggaacccgctgccacgtcgaccaagccggaccaggccgtggaggactacctgtcctggctgtccacggcgcccatggaccactcccgcccgctctgggagttccacgtcctggacttcccgacgtccgaggccaccgccaccgttgccatccgcatgcaccactccctcggcgacggcgtctcgctgctgtcgctgctcatcgcgtgcacccgcagcgccgcggacccggcgcggctgccggagctgccgcccgcgccgcgccgcgcgagccctgtctacgccaggcagcgccccccgctttccgcgggcctcgtggcgttctcgctgtggctgtggtcctacgtcttgctcgcgtggcacacactggtggacgtcgcgtgcttcgtggccacggcgtggttcctgcgcgaccagcgcacacccttcatggccgcgtccgagggcgtcgagttccgccgcaagcgcttcgtgcaccgcacgctcagcctcgacgacgtcaagttcgtcaagaatgtcatgaagtgtactgtcaacgatgtcctgattggagtgactaacgcagggttgtcgcggtattattttcgaaaaaccagtgataccaacaacgagaggaaaaaatcgcagaatattcgtgtccgatcagctctccttgttaacattaggagaacacctggtttacatgcattggcggaaatgatggattctatcaagaacaatagggcaaaatgggggaacctgattggttacatgatactgcctttccacatagccatgcacgatgatcctcttgaatacatccgccaagggaaaaggacagctcaaaggaagaaggcttcattagaagcggttttcacgtactggagtgggaacctaatagtcaaactatttggcatgaaggctgcagcagctctctgctatggtatgttcacaaatacgaccatgtcattctcaagcatggtcggacctgctgagaaggtggagttctacggccatccaatcatctacatcgctccctctgtctacgggcatccacatgctctgactatacattaccaaagctatacgaactccatcaagcttgtcctcgcagtggatgatgctcagtttccagactctcatcagcttttggacgacttcgccgagtccctcaggctcatccgtcaggcagcttcaacaagatgacagacacaaataagagcatttttttccggtagaatgtagactgttggcgagaactcgcatagaaatgctggacaataacttatcaggaaattgatggcctggttacctgactggggactcttgaactttcaagaaatcattagaggcaaattgtaaagtgtaaagactagtatgtaatatcaatattgttcaaccaattgcggtggaattacgaaaaaaaaaaaaaaaaggaattcagcatcgactatgggtagctgtttgggct

SEQ ID NO: 5163 - DNA, 5181 bp, Zea mays
  misc_feature (3591)..(3591): n is a, c, g, or t
  misc_feature (3901)..(3901): n is a, c, g, or t
  misc_feature (4488)..(4488): n is a, c, g, or t
cattgggtacctcgaggccggccgggccgccactcgtagtcgtaggcactttcatctgtgccctctgcgttcgagatcgatctcagctggcaccgtcccagttcgccatggcggaggaccggagccccaagcccatccactgcaaagcggcggtgtgccgagccgccggcgagccactcaccatcgaggagatcgtcgtcgacccgccgaaagcgtacgagatccgcatccgggtcatctgcacctcactctgccacaccgatatcaccttctggaaagctaaggtggcaccggtgtttccaagaatactagggcatgaggcgtacggggtagtggagagcgtgggggagcacgtggagggcttcgcggcgggggacaccgtggtgccgacgttcctggggcagtgcgagcgctgcgccagctgcgcgtcggagcacagcaacgtgtgcgacgcggtgccgttcgtcatcggccccgggatgcggcgcgacggcaccacccggttccgggacgcgcgggggagcccgctgcacgacctcctcgccgtctccagcttcagcgagtacaccgtcgtggacgtgaaccaggtggtcaaggtcgaccccgccgtgccgcccaagctcgcctgcctcctcagctgcggcgccggcaccggggtaggagcagcgtggaggtctgccaaggtggagccaggatccactgttgcaatctttggcctcggatctgtcggtttggcggtggtccaaggcgcgaaaatgtgtggcgcatccaagatcatcggcgttgatctcaaccctgacaaggaggaagtagggagatcgttcggcgtcacagacttcgtcaatccatcgcagctggacaagcgttccgtcgtagaggtgatcgttgagatgaccggcggcggcgtggactacagcttcgagtgcatcggcgtgccgtcggtgatgaccgacgccttcagatgcaccaagatggggaagggcaagacgatcgtgctggggctggggagggacagcgacgaggtgtgcctgccgtcgctggagctgctgttcgggaggtgcgtcatggggtcgctcttcggcgggctgaagcccaagacccacatccccgtcctcgccaagaaatgcatggacaaggagctgcagctggacgcgctggtcacgcatgagcttggactgcaggacatcaacaaggccttcgacctgctcctgcaggggaaaagtctgcgctgcatcctctggatggacaaggacaagtaacggaaggagaggggcggccggaccaatccttcctgtctctgaataaatttgccctgttttttcagcgaggcgtcgctgaaagctggtgttagcggcgaccaagactatctgttcctgaaagccggtgtatcagtatcgtttcgttgtctgaactgattaaatcctaatatcgatagattagactctccccagcaaccgctttgtcccctgaataaagtgattcatcatctcttttttacatctagcaaaaaaaaaaaaaaaatccctacaagacagcgaaggttaccgtctgtccccttgtgtcgtggtttcggaaatctgacacacgggattatattgattcatgcccggattatagtacagtgtagtactgatcgtagaattacagtagattgtgttataaattgtgtgctcgtgtgtagaaaaaataaagagtttcccttttatactttaagggattaaccttacatccgagagagaaacttggttgtcatgacgtgccattcatgggccctatgtgcagtcggactcttggcgtggcaccattcgccatttctgtccctgtagcgagttcgcagctgacacctcgtgcggtagtacgtggcaggtcccatgggtcagtctcggggcatcttcacacgtggcatggaccctcctttcgtcacgatccttgcgtcactccccatcatgttgctggccatcttccggtatgggtgttatctcgtccctttcaataaatgggtcactgtttggacttccgatgccacagtgctaccttgactaggctcgaatggccccacagggcagtgtgagtatccatgcgaccgtacattaagatgtacagtcgtggctgatggagacttcccgtcacgccctcgatgtgtcgtacacacctctcgatgtggcctagggatggcgcgccttatcgccgctgacgtgggccagcgacgcggggggtcgggtctgcgcctcacagacttgctcgtcaattgtttggacgtccgctccacctcatagtcttgctcgttagcgacttggtcgtccgctccgcctcgcagactcactcgacagggacttggttgtccgcctcgcctcgcagacttgctcggcggggaccgagtcatcagtctcgcctcgcaaacttgcttggtgggacttggtcgtccgtctcgcttcgcagacttgcttggcaaacggaccgaaagaggttatgagccttaccttgggtaccccgttcctacgtacccgatagcagcccccgagctttcgggccactcattggagtcgcacggaggcttatgctcggtggcctatacgcttaggtgtgtgcaagcgcatctgctagatgtagcccccgagccctcgtgtgatccatgtcgattgcttagggggcttacttggtgataatacatgcgattgacgccacacgctgggcgtgggtccatttccctttagtgagggtggaacgctcggatgcatgtaaacgcatctgttagatgtagcccttgagcccctgagtaatccatgtggattgcttgggtttacttcgtgataatacaatttagggatgggcccttcatgcgattgatgccacgtgctgggcataggtccatttccctttggtgagggcggaatgcttgggtgcgtgcaagcgcatctgttagatgtagcgcccaagtccccgagtaagccatgtggattgcttgggagtttacttggtgataatgcagtttagggacgagcccttcctgcgatggtcgtcacacgctgagtgtgagtccacggttcccttgtatttatcccgggggagtgacccctttgagcaggtcgtcgcttcgtcatcctcccttgccgggcgtgtccattcgccatctaatgcacgcatctccctttcgaaggatatgttaggagctcctcctttgaagggaggatctccccgaccgactgggtctacgcggggaaggaggtcgttgagctacaaacgggttatccaagtaagatacgactatcccttcacagtgcttggactcggtgagcagtcccactagggggctcgacccactgtgggcatcttattaagtccttccttattctatctcgtattggccctcctgtcaatctggtcggtcggatggggccgtggccaccccgtcagccgcgttgccacaggagaatgtgaggtacgaccttagatgtggaatcaagcaaatgacctatgggccggtcacatgacttgcgaatctctaggagcttgctcagcccacccctcactctacgcgagggagttggaagtgaattttggtttttacctggagtgaggcagtttatggtngcgttgcggtaaaaataggagttatcatggcttcgctcggcgtggctggcttgacgagacgcgaaacgacccactcaccgtgtcatgcacaagtgacgtgatggtgcggtaaaccaccctatccgttactgacgcctttccccgtgcgctccttggtgcttcgtctgaggcgatgcgaaccttgcaaaacgtataatcttcctcgcggcgcacgaggcgggggataccgatgcggtaggatctcctgtgttgtccgcgagggtccacctttcaagcaccgctttgcttccctgttcctatgtatagatangacacagaggcattcggggtcggttccgcttactgtgctttctcgcccgagcatctgacgcccctttcccttggagatcttctcgcgcccttgtgccaacctcccttctgtgctcttcttccctggcctcatggacacctttcccttgtgctccgctaccagggaacgcctcgaggacctggagaggaatgggttcctccctcctgagtcagtcttcggttggcatctagaggagggcggtgctttagcgccgcgtgatggtgaggtcgtggtgctggcctccttctatgagcgcatctttgggcttcccctgcaccccttcgtgcggggtttgctcttctactacggttgggtgctgaaaacccttcatctgaacatgatccttcacatagtgtgcttcatcacgttgtgaaaggtctacctcggcgtggagccccactggaagttgtgggtcgcgggtgatgtgtgcgaccatctctcccctccaacgccatctgaggcgcttttggctgatcggttgtgggtgttgcctaggcacgtggagcgtgtggtcttcgaaggtgcatacttccacgagatcaacgacnccgtgatcgcgaagggatatgccatcgaacggagtgaggaggaactagacgccatcgatgaataggttcgtcttcacactcagtcgcttgcaagtcgggtcgatgtgaagctcctcctgaccagttccttgagtctggaagcttccggcgatgatccgcctacccccgcctagattgtgctttcccttttagatgtaatgaacttttgagtaacttgcaagacgcttccatatgtgacattatttccgtctagggtgttggaaggtgttcgttccctagcccatgagtaggacatgtcgaattggttagcaggtgctgattgcatgtgaggaaaggagggaaaatcgcttagggatagaatttcctcaggttttcgatgttccatgcgttgttcaggagattctcatcgccatccttgagtcagtaagccctcgatcgtagagcctaggcaataatgaaaggaccctcccaaggtgatgagagcttatgcttgtccttggtggccatcactctcctcaaaactaggtcgtcgacgttgaatgacctacctcacacttgtctatcgtggtaccacagtagatcttgctggtatttcgcggagcgtatcacgacctcatctcatatctcgtcaaggagatcgatagagagttgcgcatctgtcgttgcccactcgccttcgtaggcctcagttcg

SEQ ID NO: 5164 - DNA, 1833 bp, Zea mays
atatctctttctatagccagattctccccacagccagattttcagaaaagctcgtcagaaaaaaagctgaaccaaacaggcccattacccgcccgagatttcgcgctcttcacccaaaatttccccatctccgacctcccccttcctctccccctgccgctccccgcgccgagaaggagaaccccagccgccgcgcagcgcgccgcccatggcctcctcgtcggagaacgcggctgtgccgccggaggaggagccccaggccccgccgccgccggacacagagcctaccgaggcggcgcccggcgaggcggaggatgagccgcaaaccctagagcgggcgcaggagctcttcgacaggggttccaaggccatcgaggatgaggacttcgtcgacgccgtagactgtctcagccgagcgctcgagatcagggcttcacattatggagagctcgcaccggagtgtgccagcacatacttcaaatatggatgtgccctgctatacaaagctcaggaggagagtgatgttttgggaaatgttcccaagagcttgccaaatgaagactcagtgaagagtacagctactaaagatgacagtggaacctcaaaggtctctggtaccgatgcggaggatgctgcgtcatcagaaaaagttgatgctgaagaaggtcacaactcaaatggcaaaaatcaggagaatgggaatggtgaagttgagaaagatgatgacgacgtcgacgatgatgagaagatgggagatgaagaggataatgatttggatctttcttggaaaatgttggacattgctagggcaatagttgagaagagccaagataacactatggagaaagtaaaaatatattctgctcttgctgaagtggcaacggaaagagaggacatggacaactcactcagtgactatatgaaagctttatccatgttggagcatttggttgagcctgaccatcgtcgagttgtggaattaaacttccgcatttgtttggtttatgaactagtttccaagatcggagaagcaatttcatactgtgcaaaagcaatttcgctatgcaagtcacgcatacagagcctgaaaagttccaaggatgctttgttggctggtatagatggtgatgcatctgctgctgaagctgaaggaggctcagaaaaatctgccattgaaaaagagctagagcagcttactagcatattgcctgatcttgagaagaagcttgaggacctgtctgaagcaaacccaagcgctgacatggatgagatggtgaaggcaatcgtgtccagggtaactgatgtgatgccaaaagctgcatcttttacttcttcccagatggcaacctcaagcaatggattcgactcctcggttatgtctacggcagcgacaaccggaagctctggaagcaccgtgactgaccttggggttgtaggcagaggcgtcaaacgagctagcatcaagccgatctctgctgaacctgctgctaagaaacctgcacttgattcaccatctcaacaaggtgacagcagcatcaactctgaggttgttcctgcaacgcagactggagacgagtcagtatctaagtaaattacaatttcattagccctactgtaatgttaacttgctggaacatattagctgctatgtaaacgcttaagaagggactgctggggccatagactcatcgtgagctgaccattgaaatgttaaattgctgagatcatcatggcggtaaatcatgtctgctatatcaaatatgcttggtgagatgtgtaaaaaaaaaaaaaaaagatgtatctgaccgtagtagctcaaaaaaaaaaaaaaaa

SEQ ID NO: 5165 - DNA, 2259 bp, Zea mays
tttcattttctcggaatttccgtggatccatcatttggatttgagtccactattggtttttcatcaaacgcaaattttttgtccgccgatttttgaaaccacagcgcaatgccttcgacagtatttgttatataagagcggaaacaaatctaaacaggtgatttttattcgacctgaacagtgtgaagaagaacccttcgtgggccgctgcctccttttaaccagtggagagcgcgtcgtatacgggagaccgtccgtgcctggctggccgcccgctcatcttggtggtccgaccggcctgactctcttctccttcctgcgcgctgggtccatattgtcggtgtccgaggccggcccgggctcggttcggccacgccccaccagccagccagccagggacccgtcgctgccctctggcgatgagggatattacgggtctgccctgaccaccgcccacgcgcagccaggggtagaaacgaccgcgtcaccgtatttgacccctcaccgtcccacaccagtgtcggcgagtccctcctgtgcctcgtcctccccctttcccctccgagtccagcccggcgccacccactcagccgcggatccgaggcgcagatccgatccggcgatggcgtccacggcggcgaggcggctgcgggagctgcaggcgcagacggggaacaagacctgcgtggactgcgcgcagcggaacccgcagtgggcgagcgtctcctatggggtgttcatgtgcctcgagtgctcgggcaagcaccggggcctcggcgtgcacatcagcttcgtgcgctcggtcaccatggactcctggaccgaggcgcagctccgcaagatggaggccggtggcaacgaccgactcaacgccttcctcacagctcgcggcgttcctaaggagacgccccacgtcgccaagtacaactccaacgccgcagccgcctaccgcgaccgcatcgccgcgctcgctgagggaaagccgtggactgacccgcccgtggtcaaggagacgcccggatctggcgcccccgcccccgctaggaagccgcccgtgcacacatctgccgcctccggcggcggcgggtgggacgactgggacgacgattttcggccggacatgaggcggaatcagtcggttggatcgttcgccgccgcgggtgcgcagtcagggaggcagccgccgaggtccaaatcaacacaggacatgtacacgaggcagcaactggaggcgtcggcggctaataaggaggactttttcgccaggaggatggcggagaacgagtccaagcctgacgggatcccgccatcccagggcggcaagtacgttgggttcggatccagcccaccgccgtcggctaacaggaacggcggtgctgcccagggcgatgtcatgcaggttgtctctcagggatttggacgcctttcattagttgcagcatctgctgcccagtctgctgccagtgctgtccaagttggcacaaaagaaatccaatcaaagatgagggatgggggctatgaccagaaggtgaatgaaactgtcagtgttgttgccaataaaactgcagagattggaagcaggacttgggggatcatgagaggagttatggcgctggcctcacaaaaggtagaggaatatgccaaggaaggaggagtgggtggctggggagaggattggcaacacagcgagcagaaaagtgagccttaccaaaggtttgagcatgagaccaacggcaacagttggaattcctcccaaaattcttcatcgaagaacaattccagttcttgggacgactgggacgacccaggcaagaaagatgagcctgcgaaaccgcaccagagcagtgactcctgggctggctgggatgatgggaaggatgatggttttgatagccctagttacaacaatcacagcacctccaacaaggggagcaaccaaaacgggacatccggtggcacattttggacagaaggcggcttccgctgaaaccagtctcttttccatagagctatactttcagagttgttacatgccaggaaacgtgagggtccagtggttggtattatttgggatacttaaacagtcgggtgaaagggtttgtgtgttttgtaccatgtctacaactgttattatatctagtgagatatatttctgtggtcagatgccattcaacactgcccaaatgactaagaaatgtcgatttgaaactgtaatttactcgactttgtcgcaaaaaatccgcccaccccgccggaggg

SEQ ID NO: 5166 - DNA, 2048 bp, Zea mays
cattgggtacctcgaggccggccgggagggcgttctaccgcgacgggggtcgctctataaagaccttggttgggcaccccgaggccggccgggatcgtcctccgctccagcagctgccacagagacatcagagagcggtcctccttgtgagtctgagctgaagaggaggaggaggaggaggagaagcagcagcgcagccggaggagggagagcgaagatgcgccgcgtcgcgctgttgctcgtcgccgccgtgtgcgcgctggcggcgccggctgccgcggtcgtcactgacggtcttctcccgaacggcaacttcgaggatggcccgcccaagtcggcgctggtgaacggcacggtggtgtcgggcgcccacgccatcccgcggtgggagacgtccggcttcgtggagtacatcgagtcggggcacaagcagggggacatgctgctggtggtgccgcagggcgcgcacgcggtgcggctgggcaacgaggcgtcgatccggcagcgcctggccgtggcgcgcggcgcctactacgccatcacgttcagcgcggcgcggacgtgcgcgcaggcggagcggctgaacgtgtcggtgagccccgagtggggcgtgctcccgatgcagaccatctacggcagcaacggctgggactcgtacgcctgggcattcaaggcgaagatggacgcggtgacgctggtcatccacaacccgggcgtggaggaggacccggcctgcggcccgctcatcgacggcgtcgccatccgtgcgctgtacccgcccgcgctcgccaggcgggcggggggaaacctgctcaagaacggcgggttcgaggagggcccctacttcctgcccggcgcgtcctggggcgtgctcgtcccgcccaacatcgaggacgaccactcgccgctccccgcctggatgatcgtctcgtccaaggccgtcaagtacgtggacgccgcgcacttcgccgtgccccagggcgcgcgcgccgtcgagctggtgggcggccgggagagcgcgctcgtgcaggaggtccgcaccgtgcctgggtggacctaccgcctcgccttcgccgtgggggactcgggcgacggctgcgcgggctccatggccgccgaggcctacgcggcgcgcgccaccggtcaaggtgccctaccagtccaggggcaccggaggctacaagcgcgccgtgctggacttcacggccatcgccaaccgcacccgcgtcgtcttccagagcaccttctaccacatgaagcccgacggcacgctctgcggcccgctcgtcgacgacgcctcgctcgtcggcctgcgcaagaagaagcccgcgcgccgcctcatgcagctcctgtaagcgctgcttccacgtgcactacgcccggacggaccgcgcaagcgatggtgtaatacggctggtatgtgttttttggtttggtgtgtgcgtgcgtggtatacgcgtgccgtgcgcgccctgtggctgtggctgcagtggcgtcgcgttgggtgttttcttgttgtgacgaagaaaaaagggtatgggttggggtggtccgctggccggcgcaccggggttttaatcaacttatattaacctgatgaaggtgaaggtgaaggtgacacgggattaatggcaaaaatgctcctagtactatttttgtaatatctcgtcccccggcggctcctcgctcagatctccacctccacgtcgggcgtccagaccttgttgttttcgatcgtagtccagttccaggttgttgatgccgttccggtggaggaagtttttccccccccgacgaagaagccaaccgctcatatatactcgaactggactctattgtaatccggacaggacgatcaagcatctcctagcgttttacggctccttgtaggggcaggtttggtttggcgctttgagtccaggatcagttcagatttgatgttttccatactcagaagccgccagcacttttttttttgcaatatgaccctgaattagcctttcaagtttgggaaaaaaaaaaaaaaaaaaaaaaaaaaaaaaaaaaaa

SEQ ID NO: 5167 - DNA, 1674 bp, Zea mays
cattgggtacctcgaggccggccgggatcaaacctccgccccagcaccggcccgggattcacccgggtcccccgaggcccgccgccggcacaccgcacacgcacgcacgaacgcgctcccaccccctcccgccgccaccgccgccaaaaccccggcccgactcggcgtcctccgccaacctcctcctgggcagcgccggcgggggatatggcatcggaggacgtggtgggcaagagcaggggcgacacggccgtcaccaccatcgtcaacctggcggaggaggccaagctcgcgcgcgagggggtcaaggcgcccggccaccagatcctcaccatctgcaagtcgctcgtcgccggcggcgtagcaggcggagtgtctcgtactgctgttgctccacttgaacgattgaaaatattgcttcaggttcaaaatccgcacagcatcaagtacaatggtactgttcagggtctcaagtatatctggagaacagagggcctccgtggacttttcaagggcaatggtaccaattgtgcaaggattgttccaaattctgccgtgaagttttttagctacgagcaggcgtcaaagggaattctgtgggcctaccgtcaacagactggtgaagaggatgctcagcttactccgctcttgcgccttggagctggagcatgtgctggtatcatagctatgtctgctacttacccgatggatatggttaggggaaggatcactgttcagacagacaaatctccctaccagtaccgtggtatgtttcatgcactgggtacagtctaccgtgaagaaggctttcgtgctctatacaaagggtggcttccatctgtaatcggagttgttccatatgttggtctcaacttcgctgtatatgagtccctcaaagactggctactccagacaaattcatttggccttgcaaatgacaacgagctgcacgtagttacaaggcttgggtgtggagctgtggcgggaaccattggccagactgttgcatacccgcttgatgtcatcaggagaagaatgcagatggttggttggagccatgctgactctattgttactgggcaaggcaaagaagcactccagtacaatggcatgatcgatgcattcaggaagactgttcgtcatgaaggcgttggtgctctgtacaagggtcttgtgccgaactcagtcaaggtggtgccctcaattgccattgcatttgtgacttacgaggttgtgaaggatgtgctaggagtagagatgaggatatcagactgaggatggtcgttttcaactgctatttttgtaggctttgggaagttgtgttttttttttgtaggcagggcgggtagaagggtatgaccgcggctccattcagcatcaggccctctcagcccatgttggatatatatcatatatcctgccactggcttcagtcaggtcctagaattgttgctgggtcgtgcaaaaagtaataagtcggctgtaaagcttattaagcatctgcctaactcatcaaaagaaatctattccttattgatgatgtaccgagattttcgaacttaaagcggtactacgtgctgctaacagttgattaatgatttttctttgttgctggtgatttttcaaaaaaaaaaaaaaaaaaaaaaaaaaaaaaaaaaaaaaaaaaactcgtgc

SEQ ID NO: 5168 - DNA, 4012 bp, Zea mays
ctcatgaacaccaacaactagtgtagtgtgtagttgtgtgcacgctggcttggtccccgtagcagagaaccccacccccataaaagctcctctccattggccgaacgccgagagcaccactccctccctccggctcccaaccccagcacagcgcagcagcagtcctctctcctctcactctactcctccagctccccgcccccctcccgagcccgcaggtcactcccaggtttcaaatccgccaccttttggacacacaccacacttgcctacccccagagctgagctagctagctgctctctctctctcttttcacctaagcgagaacagagcccaagaggcctcaaaagaaccactgcacttcctccgcatagctcgtcgccctctctctcctatcagtcctcccagctccagctaccacagcagccctctcgcttaaaggaggagggagaagagggcggggcgagcaatgtcggagcagcagcagccattgccgcagcctcggagcagcatgcgggaggctctggagaaggaggacaaggagaaggcggcggctgctgcggcggccaaggagaaggcggccgtccccaagaacggcaacggcaacggcggcaagaatggcggcggcgccggcagcggcaacggcggagcgcccccgcagtccggggaggagacggcccgcgagatccaggtggtcagggaggcgtaccgccgcgagacggccgcgccggcctacgtcatacccgaggagccgccggccgtggtcgagctcgtcggctggtacatctacggcttctgctcctacttcatcacccacctgctgctgccggtcctcttcccggccatcatcacgcaggtcgccttccccaactccgacttcacgcccgaccccaagtacaccctcaagggcgtcacctgctccgtccacgagatgtccatgtaccagaggcttaccaagcactccattgtgatcgatggatcccggatgtcaccattgggctggagtggactgtcgtgggcaatcggcatcctcatcgtggcgccgctcctcacccagaccgctcaccatctcgaccgtggccagtaccagtcgctgatcctcattgccgccacgtccttcgggtccttcttctgcctgctaacaggcttcttcaagacggtctgggtgttcctgttctacatcctcttcatcgctggctcgatcatcgtcgctgaggcggtgcacacccgcaaccttgggctgatgatccgtggcctggctgcgcatgactcgggcaagcaccttgtccttcgccgccgcgctgctgccagccagctcagcctgtactgcactgccataggaggcattggagctgccctcatggcagctttcatgtaccacatgctgcggcgcactgaccagctcactggcctctgggtcgtgtccatcttctgtggccttatctggttcatcggcatctgccatggcctcttcacaaacaggcccagcagctcgtcacccaccaccgcattcgagcccaacttcttcaccaagctcagctacagcatgaccctcctccgttacccgcaggccattggcagcctggttgcggtgttcctgtcctctttcgccacaatgtgcatcttcaccagcggcacgctctatgctatcggtggtgtctgcatcaagccggtgctcgtgcttgcgctatggatcctctactttctgttccccttgatctcgctcccgctcctccacccgatccagatcataatccgcgcggacgccgtgcgcatgcagctgctcgggttcataatctgcctgttcgtgtccggtgccgggttctacttcaagagccacaggtggagggctgcccacatcatcgtcatcgccctggtccagagcaccgccaatggcatactgtacgcgttcggccgcatcctgctcctcgatgcctcgccgccggggaaggagggtgcgttctcggtctggtacgcgtttgttcgtgtcaccggtgccatgatcggcttcgctgcctcctccgctggccctgggcgcgcgggagggtcctttgctgctgcgttcctcgggagcttcctgggcatcatcgtgctgatcttcggcaacgtcagcaacatcggggcgctgaaggcggccgggcacctcaaggggatggacgacgagaagaggatgggcggtctcgggatggagaagggcgagggcatgggtagcgccgtcgctgattctggcgagagcagggggagggtatgatgatgactattcgtgacagtgaattcctgggaggtgggggagaaaaggattgcgtcctgtggaggttgtgcttgtgagaaggatttgttctctcttttttttcttgtttctttggccgtgtttcagtgacactgttgatggatcccagtgcttcgcccgtttgatgcatcatggtggtggtggtgatgatggatgacatagtggtagggggtgtgtgctagttgttaatgtgttatttattcttttgcttgcaagacaattgtaactgatgatcgttagatcatatggttcttccttcgttcttcacccgcccccaaagtctcttgcagtaaagcttcattcatgattcagactgtgtccgtgtggggaaaaaaatgtgatggtggcattgtgtagacagaagtaaaacatctgtaaactcacttgtagcgatcattctgttctctctgatgccagatgctcgtatgcatttgaatccgccgcagtgccgacctgtgttcagagcttcaaaattcatgccatgtttctaaacgctcttgaactgtgaagtatacgatgaaacgcctaacgacgagtgatttcaacagcatgcgacgtaatttcttctgactttatccgctcgtcattttctttctttcatgctacgagcatctgacacagactgcgctgtgctgcccttttagcacaacaacaagcccacaacggctataaaacagcatcatgacgccattgcatttcttttttgtttttcccgcttgccttgtcctcacctgtcacctgccccgagaatctctggcctcatcagaattcagaagtcaagagacgactccgaccaaaaagaaaaaaaaatgcatccagtttacgtcggaactaaaaccaacacggatgctggtatagatcaatggtgcatacatacagtgcacggtggcaagcaagtagactgaggtctacggagacgtctacatccaggccgcctcgacgtccacgccccggcgcagtgcaggtctcgccgtcagcgctacggcatgtaatcccatttctaatctggcttgtgctgcgaagggtcaactgaactgccagttcgtcatctcagaggcaagcgaaccgagcacggttttctcatggcctctgcagaactccagtggccgtcaagaaggaagaaaccggcgctgaatgaattttatggagggggcgtgctggatggataaggtgcagtactagcagttggaatttgaggtgcacaaggtgcgacttctttttttttctctctctctccctttgcacgcgctaataattcagttgctgatgctttttgatggggtggtggtggttggacttttggactctcgatgatgtgtttacaaagactaaaaaagtacaggttaagagggctagtggcaccataatatggtgtgttctttcctttgtcaatgggggaaaaagagagtgtgatgtggtaggttttgtgatcttgggtgggtgggtgggatggtatggtctccggaaagcgtttactttggacactttttcaggttgatgttttgagcaaatatgctgatgcgaactcttagcttgtccatctgttcttcaaccgcattcaaactcctgcacctaccatccctttagacatactactatgtaagccgtaaccacatctacattaaatccactagaaactacagcaaacaagccgtggagcaagaaaaaatctggagaatgttcctatccaccacgtggtctaagttgtatccactggatca

SEQ ID NO: 5169 - DNA, 3011 bp, Zea mays
  misc_feature (1335)..(1335): n is a, c, g, or t
ttttttttttttttgcaagaaatgtatcattggaattacaaacatccgccgcgtcaataatatacagaaagagtcgaaagacaagtaccctcaacagctcaaggccacctagcaccaccaccaactgcagaacagagtgatcgactaaaacatcggccactcgactgtaaaaagttatcttatctactaaagacaattgtctggtggggtcatctctgtacaactttatatatccggggcagcaaaacaaacaggaaagatgacaagtcgcccgatcagtctcctctgaactagttccacagctccatcgaaaaacctgagcaacatgctctctatttcaagccagcaacttcagcctggcttggtattgagcggcagctcatcgctcaatttctaacatgcctagttataaatttttacaggtctctcgaatgaatgccggttctgattagccgtgtgtgccttcctaggagccgtgtccggatgttccagtccaagatactgctcccaagctccatacatgtttctctggaattttagggctacagtatctgaatcttcaaaatagtcaggacgaccgagtgaaatgtatgcaaacttccactttgagaaatcctcatctggaaccttaagctttttctgtatacgttctttgatagaagatagggtctcatcctcacgaataaccataaaaaaaggttctccaaagttctgaacttgcgtttggttttgagtgtcttttgtaaaatgatatacatgaatcaaacgatcgaaggggccaagatttttctcctcctctggaacctcctctgcacgcagtgtccagtactgatcattgatgttttcaatcttttcatttggtgcaaataccttgtatatcttgtgataaaagacctcaagtaatcttagctcagcattggtatgagacaactcaaccttcgttttgatatcattcagcacatcgccaacagtgctgttttttggtaatcttatactgtgaactgacacctcatcttttgtggcatgatggtaggtaacttttaatgccttcagcgcttgtaattctggaagtggtatgtccaatacttcatagtacagaatatcagaagtctggttataatgaatcagcatatccagtagacgttcaacgcctctgtactttattggttgaggcttaggctgctgcgaataacaattatgtgatgtaagacgaattttcgatgggtcatccacgccaagtttttcagctactttttccacgacttgatcatatgtgaaaatctttgacatctcaaggcaaaattcgtcgtccttgggcttctcccaatgaacggnaagtgcaccacctgccggttacgtcccggccccgccggcctcggggcgtcaggaaatcgatatcggtctgcactatctggttttgaaggcttttgaaaacaaattatatccccgtcttcaagctggcaagatcgaaacagaagcctgttgtcaatgtattcacacatcacattgggctcgaacttaatttcctcataaagttcaatatcatcatcctgtgaaaaacctgccaacatccttaacttcagcagaatgtcctgtggtcttcctgaagcctttacaaagagcctaccaacataccgcagctgttccttttcaggttcatagagtttgaagaaaagaaatatatcttctctagtcttgtcgggaagaggaagaggtttaaggtccagtccaagttcaacttccaagaacagtttcagttctgcgttgtgggccttgttcaccagttcctttagctgcccaacagtatgtgcttcgtcttgaggacacaatggcctgttaggtcggtaggtatcgttttgtcgcttggcccacagccaaaatcgttgaaactgtgtaggaataccaaactcttttgctacctcctccttgaattgagcaaaggtcatctgtttctggatacggaagcttgggactttattcatgatcaacaagatcaaaatatatgtctttccctatctgagcttttaagtcatcatcccttgcaaccttgattatagtatagaggtgtgcctccgctttttccttcttccgacgttccttctcttcacggtcattttctaatctaatccgaagatgctccgctatatctttctcatccacattacatataattttgtccttgtcactttcacgaatgtacacaagcatgtatgcatttgaatatttagtaaacttgaatggggtgttgtttaagccaggatttgtctgaggtagctcctcctcaccaccatattgctcttctagtgccctctttgcatcttcttttgtcacacgctcatcatcaaacttgaaccattgatcagaaagtgtaggtcgtatgaaagcatagtaatgtccaccatgaacaccaccactatggacaagaacactgtgaagggtataaagattacgcacattcctgtcagcatcaggagataaatattttccattatctctatcaagatccaattggagtggaaattcataacgatcgtttatcttcaccatcgtgtcacgcatgaaatcatactcaaaacgttttagctgaagttgcaaaacaggagggaagtcgataaaaagaactcctttttttgcatcctgcaggccatgtttgtcggcatgatacttgttgtcaccttccagacgctccacttctacgtacttatcaaatgaagcatagacatcctgacaacctttgacatcaagctggagatcatagaaggattcctttcttgttgatttgaaatccacattgatacactcaatgtagttcatgtggtgcccttcaaacaattgttgtatcgttccctccacaacagttccagatgtcaaaccttcatcttatcttccaacttctcggaaagaactctgttcaattcttgtacatcatgttgcataaatgaatcatgcatatcccacccaaacgattttgtgagctcctttgtagagacactgctgtcattatactgcaa

SEQ ID NO: 5170 - DNA, 1440 bp, Zea mays
  misc_feature (2)..(2): n is a, c, g, or t
  misc_feature (730)..(730): n is a, c, g, or t
anttaaccctcactaaagggaacaaaagctggagctccaccgcggtggcggccgctctagaactagtggatcccccgggctgcaggaattcgcacgagaccattacctagaacatcctaatcgaaaagaggtaacccaaagaacagagagaaattactgaagcatgagcgcggagctgaagagggactacgagatcggcgaggagatcgggcgcggccgcttcggggtggtccaccgctgcacgtcccgcgccaccggggaggccttcgccgtgaagtccgtggaccggtcgcggctgggcgacgacctggaccgcgagctcgcgcagctggagccgaagctggcgcagctcgccggcgcgggcaacccgggcgtggtgcaggtgcacgcggcgtacgaggacgaggcgtggacgcacgtggtcatggacctgtgcccgggcccggacctgctggagtgggtgggccgccgccgcggcgcgcccgtgccggagcccgtggcggccgccatcgtcgcgcaggtcgcgcaggcgctcgcgctctgccaccgccgcggcgtcgcccaccgcgacgtgaagcccgagaacatcctcatcgacgccgacgacgacgccgggagcgacgaggaggaccaggccgaggcggcgccgcgcgcgcgcctggcggacttcgggtcggcggcgtgggtgggcgccggtgggctcgggcgcgccgagggccttgtggggacngccccactacgtggcgcccgaggtggtggccggcggcgagtacggcgccaaggcggacgtgtggagcgccggcgtggtgatgtacgcgctgctctccggcggcgcgctccccttcggcggcgacagcgccgcggaggtgctggcggccgtgctgcgcggcagcgcgcgcttcccgcccaggctcttcggcggggtgtcgcccgccgccaaggacctgatgcggcgcatgatctgccgcgacgagtggaggaggttcgccgccgagcaagtcctcgctcacccgtggatcgtgagtggcggaggagcccgggcaatggagcggccaacctgaggaggaatccagacggacgtgtattgccgtagagcactcaggcacggcaagcaatcccggacgttatgtatgaggtttttgtacgtacgtacgtagtagtgtacggtagctgctgccagctgcagagcagatcgatcggcaaaagaagctttataggcttgtggttttcctttgccccccgggtttttggggacgctctttacctagcggagcagagagcacccgttttccgatgtgctggttttcctagctggatgtacatacactgaccgtcttttgtacagatggagtgtgctgttggatacataaataaaaaaaaaccaagcctttgtactcaaaaaaaaaaaaaaaaaaaaaaactcgagggggggcccggtac

SEQ ID NO: 5171 - DNA, 2123 bp, Zea mays
attaccgttgcaacgcacgaggcttgcagctatgagtcactgacgaagtgacgaggcatgccatgcgtgtgggcacgaagaaacaaactggtccaagacgactcttggactccctctccacttctccggccagagacgctggacggctggtgtctcgtttaattcaaacacgactcgtcgtcgggacttcgtgcgcagccgccacccgcacggccgcacgttctgccagcccagtatcccagatccagtccactactccactcccgttcccccaagtctatcagccaaagcatcgcccgccgatggcgtctccgccccactcagtcgaggtccggacccccggcgactcgccgcggcccaccgccgctctcctctccccctccgtggccgcaccccagccctccaacgcctcccgcctcctgctcctcctcaccgcggccgtcgccgccgctacggccttcgtcctgctccgcccgcccatcaccgtcgtgaccgcggcgtccgccaccgcgcggccgctctccaagctctccaagcccgtggtgctgctcatttcctcggacggcttccgcttcgggtaccagtacaaggcccccctcccgcacatccgccgcctcttcgccaatggcacatccgccgccgagggcctgatccccgtcttccccacgctcaccttccccaaccactactccatcgtcaccggcctctacccctcctcccacggcatcatcaacaactacttccccgatcccatctcgggggactacttcaccatgaaaaaccacgatcccaagtggtggctcggggagccgctctgggccaccgctgccgcccagggggtcctgtctgccacattcttctggccgggttcggaggttacgaagggttcctggaactgccccgacaagtactgccgccactacaatggctcggtgccgtttgaggagagggtcgacaccatccttggctattttgatctcccgcctaaccaaatgccacagttcatgacgctgtactttgaggatcctgatcaccaggggcaccaggtgggtcctgacgatccctcaatcaccgatgcggtcgtacatatagatgagatgctcgggaggctcattgctggtttggaggctaggggaatgtttgaggatgtgaacattatattggtaggtgaccatggtatggttgggacctgcgataggaagcttgtgtttctcgaagagttggctccatggatcgagttgaagtcagattgggttctgtcagtgacgccattgctggcaatcaggccgccagatggtgtgtcgccagctgaggttgtggccaagatgaatgaggggcttggatctgggaaggtgaagaatggggaatatttgaaaatgtacttaaaagaggagttgcctactcgcctgcattattcagagagttacaggatcccaccaatcatcgggctggttggggaagggtataagatcgagatgaagcgctccaagagaaatgagtgtggaggagcccatgggtacgacaatgccttcttctcaatgaggaccatatttgccgcacatggacctcgttttcagggtggtagaactgtgccctcatttgagaatgcggagatatacaatgtcatggcttccattctcaatttgaagcctgctccaaacaatggttcagcttctttccctggcacgattctgttgccgaacaaatgatcatggattggttttgtaggagtaagggcacatggatgtatgatggtgttctcatttggttattgtattgtacctcttaaattagacttctgccacatcactgtatctgagcaaaaatgctgctagtagagagttgcttctctctagtgacaacatttggaaacatgtttcacatcaaacgtttggctgctcaattgtttcataggagttcattcgagctccatgttttctccttaattgactgatgctcctgttgataacatatgcatttattcacgtctcatggtactcattttaaccattgtattacattatggtatactttgttttgttcttatatcgtttatcacctgtcaatgaaccagacaattgtaatatctgttatttcataaatacagatgcactcaattaaca

SEQ ID NO: 5172 - DNA, 1661 bp, Zea mays
cattgggtacctcccggccggccttgggaaaacgcaacagcgcactcgcccccctcgcttaaaagctgtagctcacacgagccgtgccactgcgagggaaggagggagagaaaaaggggagcccgatccaatcccaatcccctcccgccgcgtcacatcgccgccgtcctcgtgccccgttacctctaaaaccctagcggggagccgccgagccggggatgaagatccagtgcaacgcgtgcggggccgcggaggcgcgggtgctgtgctgcgcggacgaggccgcgctctgcgtcgcctgcgacgaggaggtgcacgccgccaacaagctcgccgggaagcaccagcgggtgccgctcctgacggacgccgccgccgctgccgccgcagcggcgccggccgtgcccaagtgcgacatctgtcaggaggcttctggatacttcttctgcctagaggaccgtgcactactttgtagagactgtgatgttgctatacacacagtgaattcctttgtttcagtacatcagagattcctgctaactggagttcaggtgggtcttgatcctgctgatccagttccacctattgctgaaaagcatgttaatgctgctggtggatcagtaaatcaaccagtgagacatcagccaaggagaagcccgacagttcaattttcagttgaagggagtgcttctgttcctaccaaaaatgtaacaaatggagattgttcaaggcagaattttgtcccaacagccaggggagaagtggttgattggactatgaataatagtacaattcggtcagtagaatctccgcctaagtacatttcagaggaaagccccacacttctgcaatctagccagaccacaacagtcttctccaaccaaattaatggcaacagtgatggggcctaccacttgtcattctcaggtggtaatgtgacagacagcctaccagattggcccgtggatgagttcttcagtaactcagaatatggtccaaactttggcttctccgagaatggttcttctaagggtgataacgctaagctggggggcgctggtggatctccacaatgccgtttggctgaaggctcagttgctgaggaactattagggcaggtgcctggattgatcaccgatgaatatatgagccgagtacctgagaattcatggacagtgcctgaggttccctctccaccaacagcctcggggctcaactggcacgggaatttgtgtttccctgcgtatgacagcaccatgttgttcctgaaattacctcccttcagaactccgaaagtcacttcaccgtaccttccagtttcaagcgccggagaagagagtactgagaggcgacaagaagatcactagacaccactgtccggtctaggctatcttgagaaaggcttcttggtgggctaaatgacgaaagaaaatatccaggactgagtggtcattcaaacatcaactgagctatccagtagccaggttttaagtgtgttgtaatgcttcaatgtgtttcattttccaaagacctgagcttcgcttgtgatttgttccgagctgtacggtgtcgattttgtgtatataatataatataacgaaataaagggtacccagtatgagtatgatcattccgaaataaaaaaaagacagagtatgagg

SEQ ID NO: 5173 - DNA, 2252 bp, Zea mays
cattgggtacctcgaggccggccggggagtggtctgagcatgctttaagaaatgaagaagaccgccacggcccgcccgctagccgttggcagccttctgccccgcaccctccgcgtcgaacaccagatccggccaccgctccacctctgtccatctcacgccaacgcccactggcgtcctcgttcctccctgccggggagcggcggagagcttttcacctcgtcttagggacctctggcttccttccccctgccggcgatcggcggagatccgctgttctaacatcgtctcccgctgctgacttgtgaacaaggcagcagcatggttcagtttggaaacatgtcatcaaagaagatagagttggatcacaaggacatggtccatgattctgctatcgactactatggcaagcgccttgccactgcctcctcagactctaccgtgaagatcatcaacattggcgcggcaaatgccccatcccaggtccttgcaacgcttagtggccactatggtcctgtgtggcgtgttgcttgggcccatccaaagtatggcgctatccttgcttcgtgcagttatgatggccgtgtcattatttggaaagaggatgcacgaggcaattggtctcaagtccatgtgttcagtgacaacaagtcatctgtcaactccattgcatgggctccgtatgaggttgggctttgccttgcctgtgcatcttcaggtggaagaatatccatcttgacgatgcgagctgatgggggttgggatactgcaaccattgagcgagcacatcctgttggtgcgactgccatatcctgggctcctgcaacagattcaatagctggcacaggggagtttgtttacaagcttgtctcaggagggtttgactcggttgttaaggtctggggattcaacaatggtagctggaagctggagagtgctcttatctctgacatgcacacagattgtgtgagggatgtcgcgtgggcaccagttttgggattggccaaatcgaccattgccagcgcttcacaagacgggaaggttgtcatctggaccaggggaaaggatggagacaagtgggagcggaagctcatgcgtgactttggttcccctgtctggagggtgtcctggtccttgactgggaacatattatccatagctgctggtgggaacaatataaccctctggaaggaagggtcagatgggcaatgggaggaggtgatgaaggttgaaacataggatgtccgtcaagttttctgaagataaagtgtgttttactagtgtttcctgcagatccatgtttcgacgtggacaaagtttgccgttgtgcttcgacagaacatccaattcacttattttggtactttctgacgaggcaattatactcttggatggatcccgtgcgctttagagtggtaatttcagatcggtgagcctgtttagttctgtatatcctcaacttcttttttggtggaacatcagagctgctgcaagtaatgttatctaataagaactgtagcaatttctattgctgtttgtgctgcggctactgtagcgctgctctggtgcgcgccatcgtttgagttttattgatttgttgtgcaagcataacatagcaagattctataattcgttccgcgtgtcattccggtgatagatttatgacatttgaggaagggatatgtttgtaataaaaaagtaattcaatctagaacatataaaaaacaggcgctccattagtccctgttcgattattctcattacacatagattagatatgattgaaaaaaaattaagaataaatttaacttacttggtatttaaatccaaccgatctcacccaatgcacatagattgaaagctaaccgaacaagccatactagaacatggacgtcttaacgggcgccctattaggacaaatggttattgtagagaaatttaattaattctttatcaaaagtttcttgttcataaaactactaagaaataaatcttagaaaatggaacaaacatgaaccagggagatggtaaatattagaagcggtaagcctagctaagctattagcctacacaaaccttgccaattttttccatgtttagttccaatgtcaactttctatctacctaacagtttggtaaatttgaaaaggaagtaaaatatacatatatgtagaatacgaagagaaagcaagaaacttcgaggccagcaaagttgttcctgcaattccagcacttgtagctcatatggcagc

SEQ ID NO: 5174 - DNA, 4921 bp, Zea mays
cctgtaattaaaagttccttggattttgattggcatgttgtgccgcgatcttcactcagtttttttggtttgctttttgcaccatgaactgcatgctttagagataacctactgaaatttaaatatcagaccgtgttcggtccttatggttaatgaatatttggatcagcatggtagatactttgtgtgcagaatgtaccatagttgaaaacactgtgtttcacatagtttatggtagtgtagtaactcctgtcgctcgagtgttccccctgaagataaatcttgtgaaatgatgccaaatgcggtcactaactctactaaagatgtcttggaggccgatgacacaactttcaataatgaatttccgatcaagttagatcagctcggtgatgatcctgttatttcccttggaaacatgcttgttgaacttatccagcacgaggattcttgttctggggattcaaatggcccgaccagtacatataagctgctcctactgaaggaaagcatttccaaggagattgaaaagactgaactcgagattgattcattggaaggcgaacttaaatctgtgaatactgaggctgcaactactcttgaaggttctcccacaggggtgacgcatacagaaaatctttcaccctctagtgggacatccaaggttcctggaagtgtggagatctgtgatacatctgatatgataaaagaaccaggggagctcattggttctcctaaggtacctgtggtgcagtatgatgatgtcaaaagtgctgatatgatggaaattgaaacagctccagttcataatgcaaaaacagttccttcagaagctggtgctatatctcctgtagtcgctgagggtaaggcctgtgcagctgctgatcttagctcattgaaagcttctgaagaagctgggtctcaaaatgatattgacaatggcaggctggaaacttcttcacgccaagctaatgctgattccatgaaattagaaattagtgatgacctaccagtgaagaaatggacataccatgatcataagtctgatttgctcagttctgtcacatctgcaaatagtgctatagccaaagaaattaatgaagtgctatttaaatcattgcctgctgatacacctcgccttgatttgtttgcatcaagtcatcttctgagccaaaggaagagtgatttgattgtcaaagaaaggcttggagtatgtaaaaccaggctgaggttgaaagagcagatgcttacaatgaagttcaaggcatattgtcacttgtggaaagacgtccaactattttctgcaaataaacagcgttcaaagtctaataagcgcactgatcagagcaaccgaacatcacaaattggatctcagaggcaacgctcctctaaccgctcgcgattaaccatgcctgctggtaatttaagtacattctcaactccagaaatgtcagatgttgcaatgaggttgttttcagagttcaaaattaagcggtgcagaaattacttgaaaatgcctgcactgattattgatgagaaagagaaggagtggttgaagcttatgaacaagaatggtctagttgaggatcctgttttagttgagaaggaacgggtgatgataaatccgtggactcaagaagaaaagaaaatttttatggagttgcttgctaaatttggcaaggatttctccaaaatcgccagtttcattacacataaatctactgcagactgtgtggagttctactataagcatcataaatcagatagcttccgagaagtgaagaaactattggaccttcgtcaacagcaacccaccagcaattttcttggagcgaaatctggacataaatggaatcctgagtcaaatgctgcttctcttgatatgcttggggtagcatcagtagtagcagcccatggccttgaatatgcaaaacaagtggagaaaatttctgcgaaatccctcatccggactgcatatgggcccaatgtgacttccgtggctaataaatcttctgataaggagtgcattgaccatgtgcctttgcacgagagagaatctgtagcagctgatgtactagcaggcatatgtggcactctctctcctgatggaatgggctcatgcattactagttctgctgatcctggacagaagattagcatgaaaagagtggagcatgtcttgtcccaagaaaatgacaaaaccgttgaggaggaagacacactctctgatcaagagtgtgaagttgacccagttgattggaatgacgacgagaagtcaattttcattgaggctatgaataactacggaaaggattttgctcggatctcgtcatgtgtgaagagcaagtcatatgaacaatgcaaagtgttctttagtaaggctcggaaatcactcggtttggatttgatccatcaaggggcagccgatgttagtatgccagctagtgataccaatggagggaagagcgatactgatgaggcctgcgctgtggaaatggattcagctatctgtagcacacagtcatgttcaaagattgcgatggatgtttgtcctactgaaggagccattggagggcctaactctgttataatctctaagcaggcagaagcatatatatcaaatgggtgcaatgctgatgttaaaattgaggaagatgagaaggtagctgataaaaattgcagcattgttgatgctaagaggtccagtgatgctactcacgaagctggtcctattgacatcaattgcccaggaagcacagataagctgcaaggaactgatgatgtcgttgacctagtaaacatgcatagtaatagtggcatcagctcttcagctaagcatgcagtggccattcactcggaaatgagatccactttacattctgtagaggtccttcaaacagacaaaggtgaaggtactggtactgatttgtcctgggtggaagaatgttcacaccatgctctggataacacaccaatgaaaaatggaaattctggtgccccggctttcttggcttcagatagtggtatcaaggacaatgttcgcatctcaaacataactgctgcttccaccgttagtcctgcattcacttcaagttatcagcattctgtacctggagatatgcccctgccaaaaccaaagccacttgttaccccgcttaccccaaaggatttaatgcctgtgcagttcagttcagtgcttcctgaccccactgcaattcgtttcgagggcatagcctcaataactacgcccaacttcgaggacactggcaacagagtcagtggtgctctaggggctaaagagatgagcaagtacccagcttttagagacccatctggtaatcagcaaagcaccttgttttgtaatattgatggttatatgaatcatcgtctgacaactgaattaccatttttttctgaaagaactgcgagtggcactgtgaatacttcacaggcggatcggttgacccaaacaaaattgcagaatggcaggtccagcagcttgtgccttcaaaacaattccgatggcattcaatggcccagagaccacgaaggaggactggaaggctctttgaggccttgctctcgcaatacaagctccgagggtgatgagcaacaaaagcggcctggtgatgtcaagttgtttggacagattctcagccatcagtcaaccctgcagagttctggcttgtcttgcaatggtaacaagagcaagcctccctcaccaaagatcgacacatctgtgagatccatgaacaatccaatggaccgtgtggtttgttcttccaggcctggcaccactccacatctgggtctggaggaaagattggcaaggtgctatggtcatctggatggtagcacggcacagcccgagccactgctcgtgatggcaaagcgccagcggtccttggccggcgtacagttttactcggctaagaacggcacgcttggtgtgttaccagattaccaacaaccttcgacgcagccacagcaatcagatcccaagcgtgtggaaaggttgtctgatccgcagaagaggaacgtgctggaactcatctcgggtttccagcagcccggcagagtcgcccgtttcgggggtgctggcatcctcgtaagcggcaacgtctcggaccctgtggctgctgctctcaaggctcagtatggtcccggttctaagattatgggcagcgacgtggatccttggacggacataggaagcaggtagcgccgtagcagctctactgcttctgttgctccttgtaccatatatttagttttggtgtaacttgaatgaaatcatcagaatatgagatgtggggggtggggagtgaatggctttcctgcccatactatctgtaggcttttggccagtagcagtcgggtttcgctgtttactggcattaacatttttactctttcttctgcagctccatacccttttggtatagcttgacatgccagcagtggcacagtgccgtaggttccctaaaggtgaactagatgtttgtcagcatggtttgattttgccagcctatgcagaaaacctcacttggtctttgtaatgtggtaatgccatgtatcagtatcctagtctgatggagttttggttgagacagttctcaaaaaaagctggttcatcttctgtttctgcttataacattgcaacgtggtgcgtttgctgagatggcatcggcacgtcgttctggacttgtcgcttttgagttttgacttcgttgcacgtgagtttctggctggaggtggatttccttgggcggcgcctgcggaccgggatcgcttttcggtttcacgagcttcttttggcgtcggctcggctctttccgtagcgtgtagggctgtggtggtccttctccagcagcagcagctacgccagccatgacctagatgccttgctcgctttgatctcatc

SEQ ID NO: 5175 - DNA, 2248 bp, Zea mays
gcacgagaccattacctagaacatcctaatcaaaaaccgcccaccgcaggccgcaagtcttgcggctcctgcccggcctagcccggccattgctccttcccagttccgagttccgacctcccgagcccgaagccagaccacgccttaaaccccgtcaatccgagatccgacggcccagatctttcgtctctgcctctccccgtctgttccccatcttcccgtccccccgccatgtcgccgccggctgccggcgcggccgccaactccggcgatgggacgcctccgtcgccgcgcgagctctacaccatcccggcatcatccggttggttccggtgggacgggatccacgagacggagcggcgggcgctgccggagttcttcggaggggcaggcggcgctgggttcgggacggcgacgcggaacccgcggatctaccgcgagtaccgcgacttcatcatcgccaaataccgggaggacccggcgcgccgcctcactttcaccgaggtccgcagggcgcttgtcggggacgtcacgctcctccggaagctctttgccttcctcgactcctccggcctcatcaacttctcggcctcctcgtcctcggtccccgcgtcgcggcagcaggaggtgggggtcgtcgtggaggcgcccgtgggtctgcaggtgacgccgcgtcctccagcgtcctacttcgccgaagagaagcgtgtagcggcgggcggggagaaggagaacgaattccggttgccgccgctgacctcctacagtgatgttttcggggaatgggcacctgggaaggcgcctatatgcggtttttgcggtgaggagtgcaatggtgcggatgttgagacgctgcaggatggttttaaagtatgttcaaaatgttccaaaagcaataatgataatatcaaggaagaggcgaataaatgtcctggtgacaaaaaagagaatatggaaaatcatgcttccagtgcatggacagacactgagacgttactccttttagaaggagtcctaaaacatggagatgattgggatcttatcgctcagcatgtccgcacaaagaataaatcagaatgcatagcaatgcttattcaattaccttttggcgaacatatgctgggcacaataaatggtaaattcgttagcaggctccacataaaccaggcagatgatggaaaaacgaaccagcacattatggagtcttcaagtcactcaaccgaaatggctgatggcatgcagattgatggaagtgaagatagtgctgataaatcagttgaagaatatcctacaaaacgcagacgattgtttttttcaatggatgctaccacttcattgatggagcagttagctatcctgaccacagcagctagcccagatgttgctgctgctgctgctgatgccgcaattaaagcatttggcaatgaaaacccgcaagcaaggaaagcctttcgcctcaacgagcaagaatataagactaaggcttttgcttctaatcatgtccaacagattgaccacaaagttggcaataaggatacggcgatgcatggccagagtggttctgataagcaggaaaagaagttcattgctagcgcatatcaattgagggcagctgttgctactgctgttggtgtagctgctgcccgtgctaaaatgcttgcagaccaggaggagcgagaaatggagctcctaatggcgtctgtaattgaaactcagctaagaaagatgcaatacaagatcaaacactttgaggagctagattcactcatggatcaagagtacaccgctatacagcaaatgaagggatccctcatgaatgaatggataaaggtccttgagcatgcattccgggctggagtgtctctaccgagagatgaattgctcaccaaactgttgctgaactagccgcccatcccatgaggacctggctgtagtcgagtagttctctgatatgcgtcacccccttgactgttgctggtagatagcttcctgcgtgggtgcgtctgtaaaggtgccgattgtgctttcgatttctcagaattttggggatcagaacaacccttcgtaactctttgccctgttgtaccaactaggttagatggcaaaattgctgaaattttcttgtagctgttgacatgtatggtttcgttcgtatggatgtgaaaatggtacctcagttttggagtttcaaaaaaaaaaaaaaaaaaaaaggccccccgcgtccgccctcgcgtccgcccaccgtccg

SEQ ID NO: 5176 - DNA, 1212 bp, Zea mays
tctggcaaaacggcactgctctgttgtttttgttaagacactagacaaagacagcttctcagatgctgaaagcataaatgcgttcgtccacccgcgcgcccgacttgagaaagcacggcatcccaatttggtccaatttgttggagctgtcacgcaaaatgtcccgatgatgattgtttcagagtaccatcaaaagggtgatttagccagttatattgagatgaaaggtcggctgaagcctcacaaagctataagatttgctcttgacattgcgaggggactgaattatctccatgagtgcaagcctgagccaatcattcatggaaatttgtcgccaaaaaacatcattcgggacgatgaaggacaacttaaggtggctggttttggatcactgagtttgagtaaagtttctgaagataaagtacaaatggctcagccagttacaaaatttgacaatgtatacatcgctcccgaggtctacaaaaacgaaccatttgacagaagtgtagatgtatttgcatttggtctcattctttatgagatgattgaaggagctcctgcttttcacccaaagccacaagaggaagcagctaagatgatttgcttagaggggctgagaccaccattcaagaataaaccgaaatactaccccagtgatgtgaaagagttgatacaagaatgctgggatccgatgccttccgtcaggccaacattcgcggagataattgtgcgcctgaacaagatacatgcgagctgtgctaagcagggtagctggagagacaccttcaagcttccatggaaacaaactggagagagataattgtaaagccccgcgaggctgccgtgtcaagatttcgccccttcccttcagcaagtgtgagtaaacacgagtcaagaaacgtacagagttacaaacagaaaggcaaagttcctatttagttcaggtttcagaccacagtttgtgctttgtagcctgtatgactgtatctaggcttatgccaccggcccaatttctcttgagctatcttcatccaaacgggaacaacagagtattaatcagtattctgaacattcagggcgtgcctattccttttgaactcctacgtgaacgttgtaaattctgcacgatttcctttcgtgccttttgtgtacgttgtgctaaagagaaccagaggcatacgcatatcccgagaaaaaaaaaaaaaaaaaaaa

SEQ ID NO: 5177 - DNA, 1473 bp, Zea mays
ccggccgggccggggaaacaattgggtccctcgaggccggaaagaaacgttcctgaaaaaaaaaaaacaaaaacacgaagaactccaccgtttcatcctctttccccaatccgttcaacgacggcttcaggaacccttcctccggcggccgccacaacgagcctcgggcaccgcaaagcaaatcctatcctatcagtcgaatcgtgcgtctcgtcgagcctcgatcctatccccgccacgccgatccctcgtcggtcgtccgaatctggtggactatctccatcgccgggcgttcatttttggcccggtgagccgggggtggggggtgggtatttggtgccgtgagttgctgctcccgcccgtcgatgcttggttagcagaagagacggcggcggtaccatgttgcagtgcctggatggagtgaagcagctccttggcgtgctcctcaagtgctgccacatcgacctcaagcagcccaacggcctagaggatccggaggtgctcgctagggagaccgtgtttagcgtgagcgaggtcgaggcattgtatgagctgttcaagaagatcagcagtgctgtgattgatgatgggctgatcaacaaggaggagtttcagttggcgctgttcaagactaataagaaggaaagtttgtttgctgatcgggtatttgacttatttgatacaaaacacaatgggattcttggatttgaagaatttgctcgggcgctctcagtatttcatcccaacgctcccttggatgagaagattgagttttcattccaactttatgacctcaagcaacaaggcttcattgaaagacaggaggtaaagcaaatggttgttgctacacttgcggagtcaggaatgaatcttttagatgaggtcatagagagcatcattgataagacttttgaggaggcagacacaaagcatgatgggaaaattgacaaagaagaatggcgcaatttagtagtgaggcatccctctttattgaagaacatgacactacaatatctcaaggacatcaccactacatttccgagctttgtcttccattctcaggtcgatgatacctgaatttctgaaaactaatgaatgtcagaaggtggactgcttgctttgccaagcaaactttcagtgcctgtttgatggttcaaaaatctcatcgtcctgaaggcatcaaatcatcgtttgttgttaataatctttttccttgttttgtatttggaattcttgctggattctgtgtgaatcctcttctattttccctctccattgttcctttattctatttcggttttgatggccagtacttgagtcagttaatgtgtacaaagttgcgtctgatgctgcctgtcattgaattgtatggcatgtgaggaagatttaaattgtatattcaacttttgtggtcatgatagttgcacatatttttaccatcctttccaaaaaaaaaaaaataatcgcggccgc

SEQ ID NO: 5178 - DNA, 1086 bp, Zea mays
attggggcccccgcgggccgggccggtgtctcaaacacacgagagctcctcttgtcttgctcagcaatcatatcgcacgagatactattgactccaagtacagaccagtccagtactgttgtacggcctggttccgtggaacagagatgggcaagcaaaagattgtgctcaagttgcccctggatgacgagaggaagaggaggaaggccttcaaggcagctgtgggaatgaacggtgtgacgtccgccacgatggagggcgacaagatcaccgtcgtcggcgatggagtcgaccccatcacgctcacaaccatccttcggcgcagcctcggctacgcggagctgctcagcgtcagctccggcgacgacaagaagaagggcgacgggtacggctacgggagcgccggtggcatgatgtacggtggcggcggatacggtggtggcaaagagggcaaggagagcaaagagagcagcggcggcaagagcagtggcggcggtgggggctacggcggccattaccaggcgatgccgtcggtctcgtaccctgccgcctaccagcagtacaacgccatgccgccctaccccgccgcctactcctatcctgcagcatacccgcagcaagaacaggaccctggatgcagcatcatgtgaaaaaacatcctacaagttaatctgaggagttggttgaaggtggccgaacacatggagatcagattaacatggttgggttcgtccggacaagatgatccatgctgccttgagctgtgcaacagaggatgatgatccaggatgtgatgggcattatcatccgtgtaattatgtacagggttggccagcaaagttgacggattgatctgttggagttggaggtgttggtggaatgggaggcagagctgttccgcaagattatgattcaagtgcagactaagtagcagcaccgatgtttcctttttgtttctttcgtttttggtaaagttgtagtgtttgttgaagaaaaggattgcaataaaattagtgtttatacactaaaaaaaaaaaatggacgaaaaaaaaaaaaaaaacccaaaaaaaaaaaaaaaaagcggcc

SEQ ID NO: 5179 - DNA, 2671 bp, Zea mays
cccgccgggtaacctcggggcaagaagcgatttacgcatatgccccctccagccatcagtagccacgggctatcctgcgcccaccacctgccctcctgccttcgtcctgcccggcgcctctgccctcctccgggctccacagagtgaaaaagtctcctcttttcctcttcctctcccgttgccaggcatggggttggcctagttgtgcccgttgagcactagcagcctccttgaaacctccagatctgtgcctccaaggcccccgttcctcggcaacaagccgtccagatggacaccgccgcgcccctgcaactgaaagcctgcgccggcgacgccgcggagaagctgctgctcgccgtcgcagccgagggtcctatctgtggtgtgccagacttcaagatgaggggaaagaagagtgatgagctcgaacctgtcgatgctggcgatgaagatgatgatggtggtgacgatggggacgaggatggtgactttggggaggagggtgaagaggacgtctcagaaggggagggatatgacaacccaaagggcaatgagaccaagaagcaaagaggtgatcctgaggaaaatggtgaggaagatgaggaagaaccagaagatcaggagggtggcggcgacgacgatgatgacgacgatgacgatgatgagaacggggatgacgaggacgacgacaatggggatgacgatgaggagggtgtagatgaagaagacgatgaccaggacgaggatgaggaggaagatgatgatgaagactcgctccagcccccaaagaagaggaagaagtgaagatcttctgccgctttagttaccgtgcgctgagttctgcctggcttttcgtcatatcctcgcatttcaactttcccatagagagttaagaaggatccacacgttcagcagcacgtgtgggcttgtaggagctttatgatttgaggcaattagggacaactcttatgtcattgttgcttgcttctgtggagtcgaacagatgtttcgctaacataattcgacttgagtgacgaaagcctccagattgaatatgccttctcttttatctcgtatggaatcattgatgcagccctggttgatagcgttccttcaataaatgaattatattggcatcatgacagcttcatgtgaattgcacgtttatactgtgcgttcaaatctcaactaatgtatgactgatcggaacaaatattattgcattatttgtagcattttgaaatagaatggttatgatggtcgatgtgaacttcgcctatggtgcctcgatattgcaggtctcttagtgtctgttggaagtaccggtttttatgaaagtggtttgtaaaaactgaggtgctcgtgcgttgctacggtttctatatattagatagaaagactatttaaatgcaatacatgttaaaacacatctaaatctttataatgagcttccaaaaagttccgagcgacttgccaggatggtgatggcatggtgcacgagtcctcacgccttaaggccttgcatgcatgatagaaggtggtgccacgatatgtgcatgtgccagcatatctctccgcctcaatcaaacatccacattcttcgatctaacctaactaatcccaatgctcaacgaatatacaactttatgagatagcaaactgtgtgatatgtgcgataaataaagttcgtacaggtaacagattcaccaacagatgtctgttataagggcttctctttctttgaatgaacgatgtaattgcatgagatcatactcatctatttctttgttttgtctgccatggtttcttttttctggttttttattaactgcacaatttaaagttcagtatggaatggcgaaagattaaaggtgagctcgtagaggtataagctcatttcgagcctagtgattgtgtagtctctgagaaaatcaacccaagagaccctccaatcatggacacccggaagtagaacactgcaacccttatgaaggccatggcgatatgtgacaactctaaaaataagctaaagtaataactccggcaattaaacaacacaatgttttttttcttaattcaggtatgattcaaatggcaaaattaatcatcatctcagtgtgaagttatttacaaattttaacacaagcaaagtatagtttaaactttaaaggaacaacactgatccagggcattactacattgactacagagcatccaccacaactcacatatatttttgttttcttaggatatggcacaaacaaatcaacatctattctttccattacccaacagagaactttgcatttgggaatacaaaagataagatatgtgatgcaatctaactctatctacgagagggtagaaatatataaattatagctaaacatactttcaatgagtacacttttctaacaattagttgcacatgtcaatagctttattgctgctacatcatatgccaacttttaagaaccttctcccatcctggccatcatcacaaaaataataatcaagcacaattttgttatgaaattgattgctgaaaatagaggggactacaaatctaacttcaatgtaaacaaaccaagctaacccacacaaaaaccacaaaaactgtaggtatgtcggcgacaactaaaccaataccatggagtccctgaagtgggtg

SEQ ID NO: 5180 - DNA, 1260 bp, Zea mays
cctcgaggccggccgggccgttccgtctcattctcatccccgacccccgcaccgcggcgccggcccggggccccggcggcgaccttgcggcctccgctgcgctctgactggtgcgcgcttagacgaggagctgcggcggccaagaccaatcgaccatggctacccgtatccagtttgagaacaactgtgaaattggtgttttctccaagctgacaaatgcttactgtctggtagcgattggagggtcagagaacttctacagtgcctttgaggctgagcttgcagatgccatccctgtggtcaagacctctattggtggcactagaataataggccgactttgtgttggttaatatctgaaatttggttttgctatttggcttattctctacttgttttcaccttccttttcactttgtttgcccaggaaacaagaatggacttctattgccacatactacaaccgaccaagagcttcagcatctgaggaattgcttgcctgatcaagtggtggttcagcgcattgatgagaggttatctgcccttggcaattgcatagcctgcaatgaccatgttgcacttacgcaccctgaccttgacaaggagactgaggagttcattgcagatgtgcttggggtcgaggtgtttaggcagactattgctggaaatatccttgtggggagttactgcgccttctctaacaggggtggtttggttcatccccatacatccgttgaagaccttgacgagctctccacgctcctccaagttcctcttgtcgcaggaactgtgaacagaggaagcgaggtcattgctgcaggcatgacagtgaacgactggactgccttttgtggctcggacacgacagccaccgagctctcagtcatcgaaagcgtcttcaagctgagagaagggcagcccactgcgattgtggaggacatgaggaagtctctgatagacagttacgtgtaactggggggccagcaaatgtgggtcagagtttgcctttgctaaaagatgtattgcaagctatagtcgaattatcagtagcacaacataaccctctgatatgttcgtggtttatccgtggtttctgaattgtagacttctgcgttgaagctcgtgctactgtttgttttccattgtttgttcacaccaacagctatatgcagatacatggcttctcagtgttacgccggcagatgaataagcttggggaaaaaaaggatgttatcttgaaaaaaaaaaaaaaaaaaaaaa

SEQ ID NO: 5181 - DNA, 2328 bp, Zea mays
acacgatcgatcgggccaggcccgcattctatgggatccgtctctccactctcttctctaccgaacacaatctcatccgtcttcctcttccccatcagccgccctaccgagtcttcgcacgcacgacgcttcgtcaggatcgattcgcgagacctctcctgtccggatcgaggttcatggtttacatatgcgcgtttgtttactgatgcataccacgaccacctgatccggatgtcaggacagatctcctgctttaatcgagtccagttcatgtatgaactctcccttttcctggcacgttgctagatgtaaaagggtgttccgggatttaagagaaccacccacgcatccatgtctgaccagcaaaggcactacggcagctacgagctcctcccggctcacccagatttgcggtgcctggtctgcacgcggccgttcactcttgacgccgaggtcaccgacagcttggaagctttagccatatgcagggagtgcaagacgacggtgcttagtgacagcaacagggacgacactccccgagccaaccgacagagaagatggcgaaggcagcaaagctccatcaggggggtctcggtgttctcgcagctgatcaacctagctagacaacagggtcatgaggcggacactgattctccgacggttccccgccgccacacatcctatagttctacgccgagccggtcccagagggggcacacttccgacgacgagagcgatggtctgagctacgccgattccgtgtttggtgagatcgagtcgaacatcagttttggtgatgagggtggggaatctgacacttctcttgatcgccacaccatggttgggagggaaattggcatacagcttgacaatgagagctacatgaacacagatacagatattgatcctatgaatgctggagtataccagtgggactcagacgatcctgaagacgatgaagatgaggagtcagaggagtctggtttggatgaaggagatgacaccatgcaggagcgccggcagcagtggcatgatatcgccccgagtggattgaatgagcaggaatctgaaggtgctgcatggacttggagaacagttggaagccaagacataaacaggactgatctgagagtcgacatggaaggacgggaaatcaggagactttttattgggaaccccggagattatgttgatgcaagacagtttgaaatgcttctcgagcaattcgctgatgaggataacaattccagaagaggagctccacctgcagcggcatcttccatcgaaaatctttcgtctgtggtcatctccaaaggctatgagataaacggtggtgtaacctgtccagtctgcaaagatgacatgcctatcaccactgtagcaaaacagctaccatgcatgcatctctatcattcatcttgcatcttgccatggcttaattctaggaacacatgcccagtttgtcgttacgagcttcctacagatgactcggaatatgagaggtccaagcatgccgcggtcaatgaaggaggtatccatggggtggagcgtacccatccgcaggaagttgttgaagaaacttatgaacctgaggttgatggaggttccaatacaggcggtgatacaatgaatgagactaatacacatgaacagcatactgcacagcagccaaatggagcacatgggcgtcatagatggctgtttattgcagcagctccagttgtaagtcttgtcagtttagctctagttttgtgcttcaccaatcctgctggcaatgttaggaggcaattgtgccgtaggtcccagactaccactacggcacatgtagacacaagaagaagttggtggtctatgttctaagtaaccagtgtttacttgctgatgctgaatttctgtgtgatggcgtgtgcttgttgccacttgccagtgttgtgtcaattatgtatgaaaaggttctagataaatttgaagtgcaaactgtgtgtgccaaccaaggtgttcttgtaaccaagttcagacagttcagcaaaacaaatactgatgattgctgctgttcattgatattttatatgtttggttgctcaggttgtaacttcaagcatgtaactaacactctgccttaaagtttacccatgcattcatcagtaagtgcctaaaatatctcttgtgcatgatgcacattgtagtttgactggtaatttgcaggtcctatgaaacttctgctttaaattaaatatgtttaactctccactccaagtcatccatgccttaaacaatctattgctgatctgatatttgtcttatgttcaaaaatatctgttcaaacca

SEQ ID NO: 5182 - DNA, 2900 bp, Zea mays
aattcggcacgaggctccaatcccggcacccacccttagctcccggacgggcggttcagaacacaaaatcaacggaccaccggaacaggaagcaacagcagcggggcgcgggtgccgtacccttcactcattccgcccctgaaagtgaaacgtacccagatctacaagctactccactcgacttccataaataccactcctgcgattccacccggcagttggaccggccgttgttgctttgcgtcttcgccaaaaacagaataagcctgtcttgctccgatcaggcgtgttcttaggcttcgctgcccctaccgcgtcttcgccgggatcggtccatggccggcgccgagcgcgcggaggcggtcgcgctggaacaagggctcctcgatccggaggaatccaaccaagtagtatacactggagatggatcagtcgacttttctggaaatcctgttgtcaaggaaagaacgggtagatggaaggcatgtccattcatattaggtaatgaatgctgtgaacgactggcctactatggcatctccacaaaccttgttacttacttgacaaaaaaactgcatgctggcaatgcctctgctgctagcagtgtgactacatggtcgggaacttgctacttaactccacttattggagcaatcctggctgatgcatactgggggaggtactggacaatcgcaacattttccacagtatacttcatcgggatgacactgctgactctttcagcatcagttcctatgctcatgcctccatcttgtgaaggatccttttgcccagcagcaagcccttttcagtatactgtcttttttcttggtctttatctgattgccctgggtactggtggaattaagccgtgtgtctcatcctttggagcggatcaatttgatgatacagatccagctgagcgaatccagaagggctctttcttcaattggttttatttttcaataaacattggtgctctcatatcaagcagctttctggtttgggtgcaagacaatgtaggatggggactggggtttggcattccgactgtattcatggggctggcaatcataagcttcttctctggtacatcactttataggttccaaaaaccaggaggtagtccaattacacgagtatgtcaggtgattgttgcctctttgcgcaagtggaatgtgcctgtcccagaggatagctctctcttgtatgagctacctaatggggtatcaacaattgaggggagtcggcaaatagagcacacagatgaactcagatgtttagataaggctgctacagttaccgaagttgatgtgaaaacggctgacttcaacaacccatggcggatatgcactgtcacccaggtggaagaactgaagatactagtaaggatgttccctgtctgggcaacaacaatagtgttttctgctgtatatgctcagatgtcaacaatgtttgtggaacaagggatggtgcttgacccatccttgggctctttcaagatccctccagcttcactatctactttcgacaccctaagtgtcatcatatgtgtcccgatgtatgattacatcgtggttccgatagccaggagattcactggcaacgagaggggctttacagagttgcagaggatgggtattggcctggtaatttccatcatggctatgtcagtcgccgcagtcctcgaaatcaagcggctagcagttgccagggaagcacacctggtggatcagaatgtcccggtcccactgagcatattctggcaaatccctcagtatttcctgattggtctagcggagattttcacattcattggggcgctcgagttcttctatgaccagtcaccagacgccatgaggagcctctgcagcgcgcttaatcttctcactactgcgtttgggaactatctcagcacgttcattttgacaatggttgcgtactttactacgaggggaggtaaccctgggtggattcctgacaacttgaacgaaggccatcttgattacttcttcttgctcatcgctggcatcagttttctgaacctgattgtttatgtcctctgtgctggcaaatacaagagcaagaaggcagcttgagttgtgaaggccaggggctggatggcgtgctgcgcgccatgttatggtggacacttcagttcaaaatctgtatatatgtttcccgcattaaccaccctagctgaagcaaccatctgcaattgttgcaaagtttatattcttcattgtgctggactaagttgattatacattcgtgcttctactttgtgtatgtatatatctgacctaaagttgctgaacatagacaatttcacttgcctctggtatccaaaaaaataattgtcttttaacctagatatgtgaggtcacgttttaacttttgtacgtagagtaaagcatcaatgtgctggttgaacaccaggagggcttggggcgtagttatggagtgtttggttggacgtggatggaaggggtggtcacatttctagtgttcggttacgcggggggcgggataaacgctttattcactttaatctcaaacaaacacattcttacttttccgtacatattacatggtagcccattctgacattctctgatggcacgtcgtgagttgagagttgactggttttggtttggttaaattcgctatcagaacgcgtaattggctgccgccttgtttgttatggtttcactacggaaagatgattactggaagctgacggaacgtgcaggctaattggcagtagtaatacatgagcgaatgtaggttcgttccaaccttccaggacagtcaactctccgcacgttgatccctgttgccctcatgcctgctacatcagcaaccggaccgcaatgagatcctctgcaccctgcaggtcg

SEQ ID NO: 5183 - DNA, 2468 bp, Zea mays
tgtttgtctaccgtatttgcgtgtgcgtctcttgtttgcctgcgattgaaagccttctctgacctgtctccaaattggcattcctgagcaaaaatcccctgcaacccgacccatagccatgggcaagctcgaggagaggacgcgtgcgttctggacgaaccgatggcttgtgttcgttggggccatgtggatgcagtccatggccggcaccacttacatcttcggcgccatctcgccggtggtcaaggccaggctgggctacgaccagccgcaggtggccgcgctgggtgtcgccaagaacctcggcggctgcctcggcctcctcgccggcgcgctctcggcgacgtggccgccgtgggcgctgctggccatcggcgccgcgcagaacttcctcggctacggctggctctggctcgtcgtctccgggaacgtgccggcgctgcccctctggctgatgtgtgttgttatctttattggaacaaatggccagacgtatttcatcacggcttcacttgttacaagcatccagaatttcccaaagagcaggggcccaacagtgggcatcctcaaaggatttatgggcctaactagcgccattctgacacaagtttatacagtgatgcacactccagaccatgctgcgcttatcttcatggttgctgttggtccgtcgctggttgccattggcttgatgtttgttattaggcctgttggtggtcacaggcagatacggccatctgacaagaacagcttcatgttcatctacactgtatgcttgctcctcgcctcataccttgtcggtgctatgcttatccaagatttcctgcaaccaagctatgatgtggttgtttttctgactgtgattctgttcgtcctccttatttcaccaatcgcaatccctgtgattgtgtcgttcatgccggaaaaagctcagcatctcatggaagatgctctcttatctgaaccattgacaggagaggcaagcagttcacgacaaaaggaggatcaaccagaggtcattttaagtgaggtagaagaggagaagtctaaggaaactgattcattgccgccatctgaaaggagaaagaggattgcggaattgcaggccaagctagtggaagcagcggcaagaggtggggttagaatcaaaagaaggccacaccgaggggataacttcaccctgatgcaggcattggtgaaggctgatttttggcttatttggctatcacttttgcttgggtcgggatcagggctgacagtgattgataacctgggtcagatgagccaggctattggttataaaaatgcacatatctttgtgtcactggtgagcatatggaactttcttggtcgtgttggaggtggctacttctctgagatcattgtcagggaacgtacatacccaaggcacatagcattggcagttgctcagatcgtgatggctgctgggcatttcctctttgctatggcttggcctggaactatgtacattgcgagcttgctggttggacttggatatggagctcactgggctattgtgccagctgctgtctccgagctttttggtgtaaaacactttggtgcgatgtacaattttctcatactagcgaaccccgcaggatccctcatcttctcagagctaattgtcagcaacctctatgaacatgaagctgagaaacaagctagccaacaccagatgtcagcattgctgtctccacgattgcttcgtgataccggctttcttgcagatgatgcactcaagtgtgaagggcctgcttgcttctttttcagctctctgattatgtcggtgttctgtgctgttgccgctgggttgagcctcctcgtcgttcaaaggaccagacaagtttatcctcgcctctacagttctgtccgcacttgagattctccaattctccatggatgggaagctcaaatcctcgtattctatgtccgtttattcttgcatacatatgcacaaagataagtatgtgaataaattctcaaatcttttcctaagctggtattgtaaaaacagatattcttgaatggactgtcccttgtgacttgcctatggattctggcacttgctgtcctgaaaagaaactatccctctccttttttttgaagcaattactgtatggagttcctacaatatttttctattaaatatgggtatgtacaagtgtaagtattcaaattacaaggaaatcaactataaacatgatttaattttggctgctatttggggttttactctatgacaaagaatcatttcttttacaaacatttctttgcatattgtcgccatgggggtttattctcaaagatccatccatttctgcattttcatatgcaccaaaccatgatgatgataatctccatcctccaagttttcgttagttgcgcaggcatatgttgcacagctagaaattgattggaagtgcgcggtggtacaaccctatcagggg

SEQ ID NO: 5184 - DNA, 3727 bp, Zea mays
  misc_feature (2009)..(2009): n is a, c, g, or t
cgacccacgcggtccgcgcgtgccccgctcccccgcagcacccggctccccttttcttgcgcgacgcgagatccccgccggggccctcaacgcgctcgcgtcgcgccgcggatcccccaccctcctcccctctgcacgccgccatcaactcgcaccggccctcgcccgtgatccatcctctcccccgcggcaatgatatggcgtcccccctcaaccgaccattcccgcagcggatccgcaccgacccgttcgcgccggcctctggaagaagaatccaccgaaggcgaaaacgacgacggaggtccggctgactcgtctgggtctttgcaacagcggcaagcgggttggagctccgcttcgggcaggggagaaccacgtggagacctggagtcacgctgcctagactcgccgctgggtggattcgtcgcggtggaggtcggattgtgaacacgccgtccagttaggacgctgtcgtctccagatccaggggatggggttgctcggcatggcggccaagggcccctcgcccacgcgtcgcctactgccacagccgcacttggccgtctcctcgctggcggcctccgtggctctgatccactgcttcctcaacacccggagatggttgacgtcgccttcgtcgtctcctcgccagtggcctccaccagccccgcagtccaagacaaagccacgacatgagtcaacccaagtccggtcgcacctacaccgatggccgtacccaacgtgagtcaagccaagtccattcccctcccttgcttcctcaacttgttgtcttgtggtctgctatttgtctcagagaaggtggtgccatcatcaccagttgtgattatgaattatattctaccgataggtattcaatctctctattcggcaacaccttaaaaatatgtacttcaaaatattgacaagtggattgcaggcttagataatttttggaacacaacattgctccaaaaagtttttctaaagaaaaggtatcaatctgcagtttggtaagtgagtctgaatctgcagcaccaaggacttcaagaattagtctgaacctgcacttacagttccatccacgcgtccgattattaataatattattttttaatgaataattgaatatatattgagtctgtgtcatagattcagtcaccttaacaccctttgttgttttcccacttaagttagttaatgagatgaatggatggaaattacgtagtgaatgtatgataagtccaggctacatgttaaaagacacacttggctacttgagctctgtattgccatgaagaaatcttactgacgggtgctttcatctgctatttggatccgttgctgatggatcttacaaagaagttgagctttaagaggaacgtggtgtcattgtcatctgagctcaagggtgtgaggagcaagcttgcttcctaggagcagctgtttgtaagggaatctcaaactagaaagcttgcggagacaaaaacaaggagcatggaagaggaagtaatcaagctgcagaaatgcttacaggacaaggatgggcaactgtgttcatccacaagtagcacggaacagtaccatcatgagttggatgatcttagaacacatctgtcatttactcaagctacaggagaagcaggtgttgcatcagctaagttagctcggatgtagtgcatgtcattgctgaaagagctgaatgagaaggacaactcactcaaagaccatagacttcgagtgaacaatctaggtgagcagcttgatcttctccagaaggatgtacaagcaagggaggtcacacaaatgcaacttaaagatatagttataaggatcgagaccaacatcatggatgaagttgccaaagcttttgaaattgcgatgttgagaggggaaatcagaatattgtctactcactggacgaacaaaaccaagaaccttgaatcacaggtatgctacatttcttttatttgttcataagaggccccaataacttggttacaaatgctttngtttcctataacgttgaactgaagtatatttacatgagatttattgatatttgatcagttaaaaaagcaccagagaactgatcaggagctgaagaagagggttctgaagcttgaattttgtctctggtcctgtcatccactggtgcgttcgccaccgcacctaccgctgttactagctcccttgctcttctcttgctgcgactgggatatagcatcgtggatcttgaacctaggccagaatttaggcaggtctagaaccaccatgatgcctggaacatactcctattttatccatgtatgagccttatgggaactctgcaattactatggatcctcttatacattatgttcgacatggagacaaggtagtatattgagttggaccaataatccttcatatttatttatgtgaattatgttgtactggtgtcctgtccttttgtttgtgctttataatttgtaattcttagctattgatatggtatgatggatgggaggtggctgaaatcgttcagataagtgccaatttgttgttttcttttttaatgaatggttttctatttcagctgatgaaccttttatagttcttttattatatgctgccactgattgctaatagggtgcatgtcttctatttctaggtatggtgcataaaaaagtaggaaccacaatgagattgtaatgctgcacatggcacatcaaggtgcgcaagatatgtaccgtagaaattatcgtaaagtgcacacagctgtatgtatagatgtttagaagtggtcgaagttaggcttgctcaaccggggcaatgatttacttagcctgctgaaatgtactataggtagcattcaagtttgtgaccatcatgcaagtacatgtgggtttgttgaaattgagtggtcatcggagaagtagcaaaatgttccctatcgagagctcgtgtactatatttgttttatgaacttaatttttattacaacggaacatgtggtcatacatatgttattgctccaatattttttccgttgcaacgcacgggtatttacctagtacccaaaatatataaagtgatactatattggatctccttaccccatatgccatatttgcatcatagaaagagcatacatatatttaagagtggttaattaaaacaaatgatactaaaataaaagaaagtgcatcttgttggacatttatatgtttgtgcattaactaaaataataagataataatcactagaagttggattaaaccctaaatggaaattagggtttgaaaataagaaaaggagagaagagaaagaaaaagagaaaatgacatagaaaaataaataatatatatacctaaaaataccccaaaaatggtatttatgatttcacaatataagttgagaaaaaactggacacaagatttgaatttaaactctaggtttgaaaataaaaaggaaaataaatagaaaagaaatgaataaaacaaaactaacctaactgggctcactgcgcgctttcggcccacttctgaattccttctgcgcggcccatctccacgttctacgcgtgtgccgggcgccgacatatggggcccgctggccagccaccagcctcacgcgcacgttcgcttctgtgtcactgctagcgggaccgcccagccagtctcctctcgcgcttgccaagacacctacatgcggggccacgacgtcagcttcatccccgtaacaaccc

SEQ ID NO: 5185 - DNA, 4200 bp, Zea mays
ccacgacgggcccgagcacagctgttgttcctactgcatctgcatccatggaggccgacggagcagtctgccagtctcttctccatcggtagtcggtaaggaagatggagcgaggtcagaggcgacaacgacgtgtgtactgcatgccggctgccgttcgggtcccacaatctcgaaaatttatagcggccggggcgtggaatctgagccccgcggccggccagggcacctcaaaactggggaggattcacggccgttccgggcacctgtctactctgtgtgactgtgtctgtcctgtcgtcgcgggccgcagcctcggcttcccagttcccacaccccacgcggccacccaccccacccgcacccggcgcctcgcttctttattccgctccgctcagcccgcccgccagagcatcacatgccattgccaacctctcactgctcgtaccgcctctccactccacctgctgcccctgcgccctgaccgcgaggggagggcgctgagctaccaaggaagccaaccggcgcggaccgggtcggtcaacgcttgctgtgcacccgaccgaggaagctaggaggatcgagcacggacatgttggcctcggcgtcggtgccggccgtctaggaaaagctcgcccgcagaggtaatggatgggcggaggaggggcggcggagctatggcgtggctgctgctgcttctcgcctcgctgtgcaccggcgcgtgcgggctcaatgcggacggggtgctgctcatgtccttcaagaacacggtcaccgcggacccgctgggcgcgctggccggctggagctacagcgacgccgcgccgtgcgcctggaacggcgtcatctgcaacggcttcccgcaggacgacaccgcgccggcggcggcgaacgtgacctcggcctccgccgacggcaacggcaccgcgacggtcgcgcgcaacgccaccggagcaaccgcggcggccggcctcggcgcgtcgctggcggcggccacggtgtcgcgggtcatcagcctcgtcctacccaacgcgcagctctcggggacgctgccgcccgacctcggccgcgtcgagcacctgcgccacctcgacctctccgggaacggcctcagcggcagcctgccgcctacgctgctcaacgccaccgagctccgcgtcctctcgctcgccgggaacgcgctgtcaggcgagctcccggacgcggcggcggcctatgcgcgcggcctgcagcagctcaacctctcgggcaacgcgctcgcgggccgcctccccgccgcgctgtgcaggctgccgagcctccttgcgctggggctcgccagcaaccacctcgccggtgagctccccgtcggaggcctcgggacgttggagcttgttgacctgagcgacaacgacttcaacggctcgctcccgtcggacttcggtgggaccgcactccgcctcctcaacgtttcgtccaacaagctcgccggcgctgtgccgaccgagctggccgccgtcgtccccgcgaacgcgacggtggacctgtcgcggaacaacttcaccggcgcgatcccacaggccggcccgtttgccgcgcagccggcggcggcgtacgagggcaacccgaacctgtgcgggccgccgctgaagcaggcgtgctcgatcccgtcgtcgctgtcgaagcctcccaacgccaccgactcgccgccggcgttcgcggccatccccaagaaccccgctcgcgccccgccgcaagcccaggggcagccgccgagcgagcaggataagcttcgtcccgcgtccattgtggccatcgtcgtcggggacatcgccggcgtcggcctcctcttcatgctgttcatgtacgcgtaccacgtcaggaagaagaggcggcagcgtcgggagcaggacccgacgccgccgctgcacctgcagcagaagagcgcgcgaggtttcgacggcggcgtagtcaagacgctcgacatcgccggaggcaaagaagagaaggcgtccacgtcgacggggcccggccgtccccgcgggcgcgacagctcggccagctccgagtactccgcgtcgtcggacggcgagtcctccgacgaggagggcctcaagaagaggggaagcttcatcggccggagcaccccgcaggagcacggcagcaagaagcacaacctgccccagcagcagcagcaggcgccccccgcgcctgcgacgctggtgacggtcgacggcgacggcgagctcgagatggagacgctgctcaaggcgtcggcctacatcctcggcgccacgggttccagcatcgtgtacaaggccgtgctcggcgacggcaccgcgctggccgtccggcgcatcggcgagagcggcggcgccgaaaagctcaaggacttcgaggcgcaggtgcgcgccgtcgcccggttccgccatcccaacatcctccggctgcgcggcttctactggggcgccgacgagaagctcctcatccacgactacgcccccaacggcagccttgccaacatcgcattcagcaggcgcttcgggtcgtcgtcgccgctgcacctgagcctggaggcgcggctgcggatcgcgcgcggcgtggcgcgagggctggcgtacatccacgagaagaagggcgtgcacgggaacctgaagccgagcaacatccttctgggcggcgacatggagccatggatcggggacctgggcctggaccggctggcgtcgggcgaggcggcgccgcactaccgcgcgggcgcgtcggcgcggctgttcgggagcaagcggtcgatgcactcgacgagcagcctgccggacctgtcacagatgcccgggccgggcgcgagcccgtgcgggtcggcgtccgcggcggccgcggccgccagcgccgccccggcgccgtaccaggcgcccgagtgcctgaagaacctgcggcccacggccgtgtggggcgtgtacgccttcggcatggtgctcctggagctgctctccgggcgggtctactcggaggtggagctgtgccagtggcacgcggggctggtggccgccgaggagcacggccgcgtgctccggatggccgaccccacgctccgcggcgaggccgacggccgggaggacgcgctgctggcgtgcttcaggctcgccttcgcgtgctgcgccatggcgcccggcaagcggccctccatgagggacgccgccatggtgctcgagcgcacggcggcggcggcggcgcccgccgccgccgcgagcagcagcggcgccgctgtgccctgagggggaaaaaacaactgaccttgtagcgcttggagccgttactgatcgcaataatcttactgcaagtgcacggacggtggtggcggcgtcggcgttgatcgccggtggcgagcttgtgtggtagggcgtgtacgtagatctgttactgattttggaggtgctgcgagaattaattaacctactaatcatctgtgtttgtgattgtggatttgaaagcgatgcatattccttttttttcgatcttgcgtctcggtggatctcaagatgtgtacttactgtgacagtgtcagtgtctgatggccacacgatcaatgggttcttctgaatctgatcgaccaaatcgggatggttcttgaacctgtcgtgccggttcagttcagtgcaccggagccggactcggacaagaattcaacaaggcctgctgctgctgctgctgctttgacaggcgctagccgccaccggtacaactctccaagtctgttttgtccggcgcgcgcacgcgacgaaacgcggtgtcccgccatgtccgttccagcgctccgcagcgagcagggaatattgtagtggtcttcctcatattccttccaccgtgccgtcactctcctcgagacggagacggagacggagacggagacggaccacgggcgacaggccagggcaagcagagagagtaacttctctgggcctctgagggtttgggaagatgccgtgttggccggggtttttttttctgccggccgcgtcttcctgccctgtgctcctgctgctctgcatgtcggtaccaccctcgcctcgtgacacgtgatcgccagagcttagccagtaagcacgggttccttaattaggtctaacccagacccagcaagtgacaggttaacatccagtccccagaaataagctgacataaactactgtgtatgtgagtgagataaaggtcaagttcttg

SEQ ID NO: 5186 - DNA, 1078 bp, Zea mays
gccggccgggtttgggagagcagcgagccatcgacacgatcgcgagcgcaagcacgtacgttgtcggaagctcaagttagaagaagcaccagtgcctacgccatgctgggcgcggtgggcgccatcgccccggagatcttcggcaagatgggcatcatccccccggagaccgcgctgccgtggttcaagacgggcgtcatcccgcccgcgggcacctacaactactgggccgactcctacacgctcttcgtcttcaacatggcgctcatgggcttcgccgagcaccgccgcctccaggactggtacaacccgggctccatgggcaagcagtacttcctcggcctcgagaagttcctcgccggctccggcgacccgtcctaccccggcgggcccctcttcaacccgctcggcttcggcaagaccgagaaggagatgaatgagctcaagctcaaggagatcaagaacggcaggctcgccatgctcgccatcctcggttacttcatccaggggctcgtcaccggcgtcggcccgttccagaacctgctcgaccacctcgccgaccccgtcaacaacaacgtgctcaccagcctcaagttccactagaacgtggtgcatcagcatacctgctgctgccgccgccgccgccagttgtttgctgtggaaagctaaatgcatgcgtgttgtaaaggaacctgaagcgttgcatcggtcatgattcatgcatggccagcctgctgcctgtaacaacaaactagtattgatcttattgagaccggaaactgtattgcacatggtaaatcaatgtacaattcctccctagatgcggacaaatttctccctaaggccatgaccatggtggatgcacgtgggacgtatttgtagcagaagagagtatgcactctgtgggtatatccaacggtgatgcgcatgggagcatgtgtgcttagagacaaaaacaacattggctttcattctgttctatcaccaatatttgcggacagtgagagagagcaaggtcccttgtaaaaaatgagtatatttggtgtagctaaagcccccatgttttgggggtttgagc

SEQ ID NO: 5187 - DNA, 1306 bp, Zea mays
atacacataggaaggaaacttctacattcacaattttcaatggaagattttcccacgaaaaatcagggatcggatcccttctcatttctagtccgagatcacccctcttcataaaaatgcggcccccgcggcccgccggcccggcattcactttccaagttgtccgaaaagaccagactaccctgttcccccgaagtcagagggggagaggaggctagggatagagcagcgtcatcgcaccgctcgccggcgagccagatcatcagtgaggaaggcagcgatggcggtggtggagctgtgggagacgctgaagcaggcgatcgttgcgtacacgggcctgtctccggcggccttcttcacggctgtggcggtggcggccgctctgtaccacgttgtgtcggggctcttcgcggccccgcccccgccgccgccgcgcccacgggaggagcccgagacagagccgctccctcctcccgtgcagatgggggaggtctccgaggaggacctccgccagtacgacggctccgaccctaagaagccgctcctcatggccatcaagggccagatctacgacgtcacccagagcagaatgttctatggacctggcggaccttacgccctgttcgccggcaaagatgccagcagagctctagcgaagatgtcgttcgagccacaggacctcaccggcgacgtctcgggcctaggcccgtttgagctcgacgccctgcaggactgggagtacaagttcatgagcaagtacgtgaaggtcggcacggtcaagaagagcgtccctgtggaaggcggcagcaccgcgagcaccactgaggctgagaaggcgccgacaaccgaagagaagccaagcgaggcggtggttgagaaggaagccgtggctaatgaaggtgcccaggaaaactagagcttttctgtgcatgcggcaataattcgacatggtcccatttgggtcttgtcagggccctgctatcctctcgtgtctcgtgtcgtatatcagcagcaatggcccgtgtgactggatacgtccatctgtgccagcgccgtggtgctctataattgctgttagtcccttgtggccttgtgtgttcgatcggataatcgagttattttctttgcagtaccctaaggtcatcaggttccttgtaatgtctcgcgcacgtggggatatgccatgaaattgtcgtggaagtcatgttattgtttactgcaatgtgattcctgtcaacgtgcgtggcattgagccaaaaaaaaaaaaaaaaaaagcccgagaatggtacgagaaccgcccgccctc

SEQ ID NO: 5188 - DNA, 1510 bp, Zea mays
tcgttcaatttctgtttgctagactgcagatgcaagtgcaataactgtcaaccaatcagcgcctagcttgaagcctggcgttacccctgtggtagagtattttcctggtacgtggaaatcatcaaaccacctcatttgttgtgtcccgcaacgcacgtacccagacctgtggacaggacgcctcggaccagccagcggtcatggccatgcacctgccagcctcatagtaatcaccttgaagcttgacatactatgctactcatcaatagactttccagtggcggctgctgtatctgaacttgttattccaggattagcagatcagatgattgtaatgaagagaattattgcttcagagataactcaacaagcacagcttcaaccattccattttattccttctggttggcatgttccagtaacagctatatacaatacaagatatggtgagactgaggagaggcaaagtgagctgcgaaaagaactgcatttaaggctaggacttcccttagatcggcctttgttgcgaatttctaatgcattgactttcggtggcatgggaaggaggaagaaaagcatgccaagaagtggttcttcgctgcttcgagacatccacagagaacttccatctagtggtgtatccggaggtgttatgtctttgattgatggttcatatgagtattatcattatcttcacgatggtattgatgacaatggatggggatgcgcatatcggtctctacaaacaattgtctcttggtacagattgcaacaatattcatcaatagatgttccttctcacagggagattcagcaagttcttgttgaaattggtgacaaggatccatcatttattggatcttgtgagtggatcggagccattgagttaagctttgtcctcgacaaactgctgggcgtgagttgtaaggttatcaatgtgaggtctggcgatgagcttcctgaaaagtgcagagaacttgccaggcattttgaaacccagggaactcctgtgatgattggtggtggagtcttggcttacacccttttgggagttgattataacgaagccagtggagactgtgcatttcttatccttgatccgcactacactggtactgacgatctcaaaaagattgtaaatggcggatggtgcggatggaagaagtctgtcgacagcaaaggccgaagcttcttcttgaaagacaagttctacaaccttctactaccccaaaggccaaacatggtgtgaaacctatggtgttcaatatgttaatagtgcagacgtgcaggttcacgaggcacagatatttatgcttgtgatagaggtttatggttgcgatagcagaagttatgatttgtaaaaaaaatttagtgagacattatattgtttttttaataaatttgtagtgagtaaattaaattaaattaacgaatttgagagttttacaggcataacactaatagctcgcgttttgcttgagacgtcatgcttaacaagtggagtctgtgt

SEQ ID NO: 5189 - DNA, 1304 bp, Zea mays
  misc_feature (1243)..(1254): n is a, c, g, or t
  misc_feature (1256)..(1261): n is a, c, g, or t
  misc_feature (1280)..(1281): n is a, c, g, or t
ttaatcggtcctaatcgatctggcacattgttagtactcctgctacgtactatgtttctagtagcccacaagatctagcccagtccaaacctttcgatccgtggtgtgttggatctgaacccaagctccgagtcgctttcggggtgggcattctcctcttcgtcttcggttgcaagaaagaaaaagcatcatggacggcttccccaagagcgtcggcggtggcggccctaacattccggcgggatcccaccccgcaggcgggagccaggcggcggcaggaggaggcgcgacgcagcggacgcagtatccgtatgtgactggtaattcagtcattgccttgaaatacaaggatggtgtgatcatggcatgtgacactggagcctcttatggatcaactttgagatacaagagtgtggaacgcattaaggcagttggcaagcatagcatcattggagcaagcggagagttcagtgacttccaggagattttgcgctatttggatgaactaactctgtctgatcatatgtgggatgatggaaactcgctgggccccaaagagatccacagctatttgacaagagtgatgtacaaccggcgcaacaagtttgatcctctctggaactcacttgtacttggtggggtgaaaaagggtccaaagggtgatgagaagtatcttgggatggttaacatgattggtacccacttcgaggaaaaccatgtcgctactggatttggaaatcatatggcaatcccgatactccgtgctgaatggcgcgatgatatgacttttgaagaagctgttaagctggttgagaagtgcttggtggtcttgctgtaccgagacagatcatctatcaacaaattccagattgccaagatcacaagtgaaggatcaaccatctacccaccatattccttgaagacctactggggcttcactcacttcgaaaacccagcccagggcgctgtgggatcatggtagatttatgctctgcatgccgcgtatcatgccatgaacttaggggagagcaatctgtgctgctgaaatcaaaacccttgtgaacgtttgttctgaacataactggaactctgcatttgcttgtatgacatgcgtatggttcaggaagtttaattccaatatttggtcactaaaaatggattgtgcggttgtgttctcggggcccggttctgtgttgattgtgctatgtggagaacttggaatgctaactctgttttttttttnnnnnnnnnnnntnnnnnnttttttttttttttttttnnttttttttttttttttttttttt

SEQ ID NO: 5190 - DNA, 2094 bp, Zea mays
caccaccctccttgcccgccggcgtctcctcctttccctcccggccacttctctcgtttcgccctccccctcgagcaccccgccggctagggttacggccaccgccttccacgcctcccccacttcccgtaggcggaggctggtcggcgtgcacgcgaccgcggcggcggagatggacccggacttctcgcccgggggcggggggcccagctttgaattcgccttcaacgaggtcaacttctccgaccgggaattgcgtatcgaggtcgtcgccggggatgactacgctccggggtccagcggcgccggtgccggaggaggtggcctcgccgactgggcgcgccaccgcaagcgtcgccgtgaggagctcctcaaggagaaagaatctacaactcacatgtcagaccaaacaaattgcaatgaagttgaagcagaagagtgtgatgcgtatgaagaaaatcaagaggaacctgtagcaatggtagaagaatctccacccgatgttggccaagatggtgatgatgggcaaggtattgattcgtcttggactgtggttggtacaccagttttacgagtcaagacaatttatatcagttcagcgattcttgctgcgaagagtcctttctttttcaagcttttctcaaacggcatgaaagaatcggatcagagacatgcaacccttagaattactgactcagaggaaactgccctcatggagcttttaagctttatgtatagtggaaagttggcaactactgagcccactcttctgctggatatcttgatggctgccgacaaatttgaggttgtttcatgcatgaggtactgcagccagttgctcacaagcttgccgatgaccacagaatctgcacttctctacctagatctcccttgctcaatttcaatggcagcagcagttcaacctctgacagatgcagctaaggatttccttgctgtaaaatacaaggatttgactaagttccaagatgaagtgatgaacatccctcttgctggaattgaagccatcttgtcaagtaatgacctccaggtggcatctgaagataccatctatgacttcttgctcagatgggcccgtgcacaatacccgaaatcagaagagagacgtgagatccttagttctcggctgctccctcttgtgcgattcagtcacatgacatgtaggaagctgcggaaggtcctaacatgcacagatatagaccacgagcaggcaaccaagtgtgtcaccgaggctcttctgtacaaagctgatgcaccacaccggcaacgagctcttgcagcggacacaacaacctgtcggaaattcgctgagcgggcttacaagtacagaccactcaaggtcgttgagtttgatcggccctatccacagtgcatagcatacttggatctcaagcgcgaggagtgctctcgactctttcctgcaggccggatatactcgcaagcgttccacctcgcagggcagggcttcttcctctcagctcactgtaacatggagcagcaaagcaccttctactgctttggcctgttcctggggatgcaagagaagggctcaacgagcgtgaccgtggactatgagtttgctgcaagaacgagaccatccggcgagtttgtgagcaagtataagggtaactacacatttaccggtgggaaggcagttgggtacaggaatctctttggaatcccgtggcaggcgttcatggccgatgacagcctcttcttcatcgacgggatgctgcatctgagagctgagcttacgataaagcaacctacgtagatgtgctgccgtcgggttaagtgtgtccagtcatgggtgatgtggaaaatgctgtgtgctgcagatatcctttttgttttttttccttttgttcacgcaccttaatccttacattaatagacagtttggtgatgacaaaatataaaggaaaaaaaagggctggaaagctgccttttgttgtttcactaagatgaaggttgtatgatctctgtctcttcgtagtggaagttgttacaccagatgaaaaagaaaagatatcggatgggaatccccccgcccttgagttctctgcaagtttccat

SEQ ID NO: 5191 - DNA, 1388 bp, Zea mays
ggtacccccgccgccgtccggcgtatgcgcctcgcggccgcttcggcaggccctcgcgttccatttgcttcggctcatctcagatcaagctagcgcacctgacacccaccacctccctcccagatccaccaccccagccatggccaccgcctttgactccccgacctcctcccccgccgccgcgcccttccacgacgaccctttcctccatttcgacggctcggcccccgccgccgccgacggcttcccggcctccccggacgcctacgcgccctcccccttcggcatgccccactccaacggcgacctccacgacgaccctttcgccgcacctgctgactccaacggtgggcccatccttccgccgcccaccgagatgggccgcgaggagggattcctgctccgcgagtggtgccgacaaaatgctattcaccttgaggaaaaagagaagaaggagaaggagctgaggagccaaatcatcgttgatgctgaagagtttaagaaagcttttgttgagaagagaaagctcaatgctgagacaagcaagggccaaaaccgtgacagggagaagcttttcctagcaaaccaggaaaagttccatgctggtgcagataagcaatactggaaggcgatatctgaacttatcccacatgagattgctaacatcgagaagagaggggcaaggaaagacaaggagaagaagcctgggatcgtggtgatccagggaccgaagcctgggaagccaacggacatggcacggatgcggcagatattgctgaagctgaagcacactcccccaccacacatgaagccacctccgccacctgccgcagctaccggaaaggatggagcaccagctgccgccgggaaggatggagctaagccagcaaccgttgccaacggcagtgtccctgagatggaaaaggctgctgcggaggcatcagtgccagcggcagcaccaccagcagcaactgagccgatcgcagctgcttaatctaatcatctatggtaggaggatgtgaaaaatctcttattggagttgttgcagaggcggtggtggtgagtgaaactgaaaacgtgtgaatttccggcatggtggaggcatgcactgtgtatttgttacctcgattcatttacattactgctactatatattgttattgcattttgtagagaaggggcgggcgtatcctggttcatggtaataataaggttgtattaggaggatgtttggctgtattatgtttcttcttccaagtgtttgtaaatttcccttttgttattaaaactgattgtattgttaaatttttctttgttattaaaactgattgtattgttaagctactatctgctgcatatacggagtatcttttatgatctcgtgcgaa

SEQ ID NO: 5192 - DNA, 1793 bp, Zea mays
ttggtgtcgctcgccatatccccttttcccccctcccttcgtctcccgactcctgcgatccgccccacctgaaccctactccacgtcgcctcgcctcgcctcgccggttgggttgtggctgagccgatctgacccgatcgggtgggtccttgcgccgccgctgcgtgggctcatctcggtcgcccgcctgctcggctcgatcggccggggacggcggcggctagatctgcgatggagggcaacaaggacgacgcggccaagtgcctgcgcatcggcaagggcgcgctcgaagccggggaccgcgcgcgcgccatcaaatttatgtccaaggcaaagcgcctcgacccctcgctacccatcgatgacctgctcacctcccttctcaacgcgcaagacgactccccggcttcctcatcatcatcgccgcctccaccaccgcaaactgccgcagcaggggcatcggaggcagctgaggctgatgggctgagagagaggaagcacaagggcaagaagagggaggaggaggaggcgactcctgctgccagggagtacaccgcggagcagctcgaggttgtgcgccaggtcaagaagcacaccagggactactaccagatcctcggcctggaaaaggactgcagtgtcgaggacgtgcgcaaggcctaccggaagctctcgctcaaggtgcaccccgacaagaacaaggcccctggcgcagaggacgccttcaaggccgtctccaaggccttccagtgcctgagtgatgcggagagccgcaagcgctacgaccttgttggctcggatgagccagtagcacaccacaggagggcctccactgcccgcgcatacaatgggttctatgaggatgactttgacccagatgagatattcagaaacttcttctttggcggtatggcgcctgcaaccaccaggcagtttggacagtttggaactttccattttaggactggtgggatgcatgcccatgcccatgcccaacaaaactctggtggctcaactgtcaggatgcttattcagctgttgcctgtcctactgctgctgttgctcaacttcctgccatcctctgagcctgtctactcgctgtcccgttcatacccttatgagcataagttccaaaccccacgtggagttgcatactatgtcaagatgtctaatttcgaggagcagtatccacaccaaagcactgagcgagcgacgctggagcggcatgttgagagggattattactccataatcacacagaattgcagggctgagctgcagcgtcgccaatgggggctgtcataccagacaccacattgtgatatgcttaaaaattttgaggctgcagcaaagtaataactcatccaattctgtaaggttgacatggggagagagactgctggccactcatgtaaaggcgctgccttagccgccagcttcaagtttgaggggacattttagtttggcttagtagtaaattttgtggaataagtgcctttgataactatacaccactgtccagatgctccctcttagtattggcaaggagtgcgttaattagttacttcaaaaagatatgcaagcttcataggggttgatcacatgcaaaccagtgtatgtatatgaagtatatctatctcattcttttaacttttttgaagtgaagactgtagttaaaacagaaatgcaactataacacaaatgtgatattcattttatattaaaaaaagaaaaaaaaaatccgacggggcgcccggtaccccgatcatcggacatcattccgttggtattgg

SEQ ID NO: 5193 - DNA, 4622 bp, Zea mays
  misc_feature (660)..(660): n is a, c, g, or t
taaggggggggattacttaatgaatccggaataataatcatcgtgttatagaattgtaataggtgacacttggtaagagtcaccaagaaggcataccaagcaagggccatcaccaaggttttcttggctcttggtcatcctgcgaccgtaccccttaaatttggcgacgcttgagaagggtcagtatcgaccagtagactgaatgaagcaaaataagaggtgactagatggtcatttgtgtggtgtgttctggtggcgatcgagtggtactccattactgtcttccaagttccatccacaacgtctgacgtattgtagttgtagcgagcatgcaaacttattaaagacggccagcactgttcgttggcgcgccataatgtgttgctgcggcatgcatgcatgcatgctcatcgaccccactcgcagaactgacgcaacaaattgaattgcctgtcgatgtttttatctttttataaaaaaaccctgcaatcttaagcccgcgacacggcgacaacaacgattatttgttgaaccaccggggcagtacttgctgcatacaacaacgattttttttttaaaaaaaaattattgaaccatcgtctcaccattttttccagctgtctcaactgtccgaccgattggcaattcaatggccgaaantaaagtggtgcgtaattattatgggaggcatctaatcttctcgtacgccatgtgacattgtgtgtctcccaaaagaaaaaacattactacgtacgtgtactcctacacttgagctcgtatatatctgtggtagttttattattattttgaactcaagtgcatatatactcacgagcaaaataaataaataaattaattaaatcgtgcagctgccaagcttatactacctgtgataagttcgtcatttgaaacccttgtaccacggtcgttgatccatattttaataagtcgtccaacccctagcaatataaatggactctcagcggtaatctctgggtacaataataatgctcctaaattagcactagtagaatagtggtagtaaaaattaaaggagaaggccggtcaatcgaaacggcaaggaaagcgatagcgacgaggagtgggctgggccggggcttggcggcaataaataggcggccgggtcatcggccaaccccccatcgccgcctgctctctacctctgcactccaatcagatcatcagatagatcactggccccgtgctgattaccgcgcttcccatctgagcagccagcctcccagggtacagggagagacgcagaagagacagctgctgcctcgctgagacgatggccggaggcggagaccactcccagacgaacggaggccacgtcgaccagagggccttggaggagggcaggaaggaggagttcgctgaccagggctgcgccgccatggtcgtctccgtcccatttatccagaaggtacggtggtgctgtgagagatcaaaaggcactggccgagatctctctctcgtctgccgtgttcttcggctcttcccccgtccgcttaatactctctctctctctctctctctctctcaacatcaacgttattcatcatgtctcggtcaaattatggagttttgtgctgctcactgcatttgcagatcatcgcggagatcttcggcacctacttcctgatgttcgcggggtgcggcgcggtgacgatcaacgcgagcaagaacgggcagatcacgttcccgggcgtggcgatcgtgtgggggctagcggtgatggtgatggtgtacgccgtgggccacatctccggcgcgcacttcaacccggcggtgaccctggccttcgccaccagcgggcggttcccgtggcggcagctgccggcgtacgtgctggcgcagatgctgggcgccacgctcgcctccgggacgctgcgcctcatgttcggcggccggcacgagcacttccccggcacgctgcccacgggctccgaggtgcagtcgctcgtcatcgagatcatcaccacattctacctcatgttcgtcatctccggcgtcgcacggacaacagagcaatcgggggagctggctgttttgtttgtttgtttgtttgtttctttcttttccggtcgttcaacccgtacgtactgtgcatatatatttgcagatcggggagctggctgggctggccgtgggcgcaaccatcctgcttaacgtgctcattgccgggtgagtacttacgatatatatacttactcttcgtgacgtgctcattgcctggaatatacatattttgtacaaaatttaagtagtacaaattataataagtactactacaaattataaggagcagccagcagggttgtcgtcgtcacaagaataactttcaagattatttttgttttacttttcattcacaatgcgtgcacaaaagtgacgacaaactgcctagctagagtatttacccaacaagtcaagtcaaaaaccaaaagagagaattagaatatagatattttttatagtggggctttgcgttgtggacgatgtgtctcgatctgtctgccgagcagggttttatggagccataaagaccgtcacatgagtagagtagggcagggaaaaatgagcttttaaagtgtggttggtgagacaccggtgcaatgacattaatatgaacgtaataccactccactccactgtccttccagcttttaaagtgtgtttgcagaaaactgcagagataatgtgaacaccatatatatacttacttgttattagtaatgacaacagtcctaaaattacacgctgcccacggtgctccgaggtgcagtcgctcgtcatcgagatcatcaccacattctacctcatgttcgtcatctccggcgtcgccacggacaacagagcaatcggggagctggctgggctggccgtgggcgcaaccatcctgcttaacgtgctcattgccgggcccgtctccggcgcgtcgatgaacccggcccggagcgtgggcccggcgctggtgagcggggagtacacgtccatctgggtgtacgtggtggggccggtggtgggggccgtggccggggcgtgggcctacaacctcatccgcttcaccaacaagcccctccgcgagatcaccaagagcacgtctttcctcaagagcacgagcaggatgaactccgccgcctccgcctgatggatctccatggccggtaatttagcctacaaaactatatattcacccgtgtcgtcgtgtcagtacgtgagaggatatagatatataattcctgcgtgcgtgtgcgtttgtgtgtggatggaaaacatatggaagaagaggtatggtttgtgtgtggatggaaaacgtactgtgcctgccttcgaccctgggcaacgtcgctctaccccgtgaacgtgcttaacctgttgccgcatgttttgttaactcaattttaatgtgttggcgagatcatacgcatcaaaaagaaaaaaaaaaagcccgcctgggcgcgccccgtacgacacatacagagttccatccctccagtctatgacacacacgcgtgcgtcgaagaagactgaaatggaagagagaattaactgagcaagaccgaccccaaaaaatagataagcatccggtgtaggtagttaggtattagacgactatatacagtaaaatataaacaaataaacatgatttggatggatggatgaaccgatggtgttcgatcgcaagggcaacaataacatatacgtattcgcgtttcacattactattttcgccatgaaagatcattgatatgtaaatttgaagtcattacgaattcacataatatcaaattatatatttctaataaaatagaaacatgctacaacaacaatgttagggtgcatttggttggagagccaattgtcactactggacaaagttggaacactcggcaaagaagcttatttgccgagtgtcaacgacgaacgctcagcatagttaacggtcatcatctataaacgccgtcttctttactgagcatcttgtttcgctgagagcttcacgctcgggaaaacaacctttgccgagcgttgttatatgacgagtgttttgcacttggcaaaggttgtctgtgccgagtgtcgtagttcgccgagagtggcacccgacaagtgtagaatggagcggctccattccaatttctgaaaatggaaccatttcattttatgtttggcaagtagaacaaagccgctctattttttgtttggttgaagagtagaatataacgaagccgttccattcattgtttggttggagagccatacaagtgtgaaggggagaagagaaaggagagcgctcacatctgtaagagcgctcatatttgatcgttttggtggagcaggagcattccaaatatttgccatatatagactgcagagccactgcactcctcttccgttagaaaccaaacattacagaaatggaatcattcaattctcctctctcttctcaaccaaacacacctttagtttttttagcaaataaagcatcttcaatactatatcacgaaaagttttcatggcacttcatcacctaattgactagtactcgtttgaggcgatggcatagaaccaaatctcctcagcatatgacctcg

SEQ ID NO: 5194 - DNA, 2489 bp, Zea mays
ctctcatcgcggctgcccctcggcgatctcatgagcctcggtcgcctctcttcctcagcccgctcgccccctcttcgatacccccgataaaacccccgacccgccccgtctccagctggccaccccatcctcgtcttctccaattccaaagtaagaaagccacacgcgaggccgaccgaggaagtccaatctcatggcgctctcctgcatgaggtgccccgcgggcgccggcgccgcctccgcccgacgcgccgcagcgcagccgttggccgcggaggctgcggtctccttcgccagatgccgcggcttcgggaggtccgccaccgctgcgacttccgcctggttttggcgcaaccatgccgttgcctcacagggagtgaaagctcccatggatgctgatgtcaagaatgctgtcatacctcctacctcaccaaaggtggaaagtggctctccttcagaaatcactctggatgaatttgaagacttgagcgctctatgcaagaatgatgattctactgttagcatcacagtagttggagcatctggtgaccttgccaagaagaagatatttcctgccctttttgctctctactatgaagattgccttcccaagcatttcaccatctttggctatgcacggagcaagatgacagatgctgaactgaggaacatggttagcaaaacactgacttgcagaatagataaaagggaaaattgtagcgagaaaatggaagagttcctcaaaagatgcttctatcattcaggccaatatgattcagaagagcatttcatagatctagacaagaagctaaagcaacatgagggttccagagtttctaaccgccttttctacttgtcaatacctcctaatatatttttggatgttgtaaaatgtgcaagcaaatcagcatcttcggtgaatggttggacacgagtaattgttgagaagcccttcggccgagactcagaatcctctgctgcattaacaagcggtctgaagcagtaccttgtagaggaccaaattttcaggattgaccattatttgggaaaagaactggtggagaatttgtctgtcctgcgcttctcaaatctcgtttttgagcctctctggtcaagacaatatataagaaatgtgcaacttatattctcagaagactttggtactgaaggacgtggaggatactttgatggctacggtattattcgagacataatgcagaatcatctcattcagatactagctttatttgctatggaaactcctattagtttggaagcagaggatataagaaatgagaaggttaaagttcttcgttccatgaagccgttgcagctggaagatgtggtcgtaggacagtataaaagtcacacaaaaggtggtaccacataccctgggtatactgatgataagacagtgcccaaggatagtgtgactccaacgtttgctgctgcggcgcttttcataaataatgccagatgggatggagttccctttcttatgaaagctgggaaagctttgcacacaaaacgagctgagattagggtacagttccgacatgttcctggaaatctctacaaggggagttttggcacagatcttgatagggccactaatgagcttgtgatacgtgtgcaaccggatgaagcaatttacctaaagattaacaacaagattcctggtctcggtatgcgactagataggagtaacttgaatctccattatgccgcaaggtactcaaaggagatacctgatgcttacgagagactcctgcttgatgccatcgaaggagagcgcaggcttttcatccgctcagatgagttggatgctgcatggtcactcttcacacccctcctgaaggagctggaagagaagcggatagctcctgagctctacccatatggaagccgtggacctgtcggggcccactatctcgccgccaagtacaacgtaagatggggtgacttgagtgcggagcactacaaggcatgaaacgaagatggccatatctttgtgatattcttgcttttccatttctataagtttgcacgccctggcagtgagatagatttaagagaaaaaaaagatgagaataaggcgggcagttaactaggttggaaggcatgtatccattactagactgaatagctttgttggcataattgcagctgttagggctagtttgcaaccccgtgtttccaaagaattttcattttcccaaagaaaattagtttattttccctttggaaaatgagaatctcttgggaaaattgagttgccaaacgcccttaaaaatatgtttctaggaatcagtttatttttcacaggaacaataaaggaaacggaaaaaatttgccgcatttcaaaaaaaaaaaaaaaaaaaaaaaaaaaaaaaaaaaaaaaaaaaaaaaaaaaaaaaaaaaaaaaaaaaatataaaaaaaaaaaaggggggggcccgccacttgggggcttgtccacccgggaattaat

SEQ ID NO: 5195 - DNA, 1581 bp, Zea mays
gaagtaagcgtggatgttgcccacgtggcccccggctcctccagaagtagccatacggattcagatcgcggccgcggcgactccccgagcagaagaacccgatcgaacgcggccgcggcggcgactccccgatctcagatccctgctgcgagcgaagggttccattcgagcagagatggcggcggcatgggaggtgctggctgtgttgctcgtcgcggcgcaggtggcgtcggcggcgcaggtcacggcgccagcgttcctgtgggcgcccaaaaactacggattcagctctgatgatgctaaggaggtagtccattaccaaacaatctcaccaaagagcttagctaaatctgttctcgaggaaggtggctggtcaaacttcatgtgctcaagggaggatactcagaataatgttgatgttgccattgtttttattggctcaaagctgcaatcgtcagacatatctaaagataagcaagttgatccagctttagcagacacactgaagctctccttcacacgctcagagttttccatggcattcccctacgtttccacgacagtcgacgagagactagaggactcgttgctatccagctttgccgagaactgcaacaatggtttcggaagaaaccgcgtcacctacacagacacgtgtaccggtcaagatctgaagaaataccacaacatggatgccatcaatgacctggtagtgtcaggggtagcgtcaaggagagtcaaccacccaagtggacagaccgatgtaatcgtcttctgtagcggcgggttcgagaatccaggcactgcgaaatcagaaggagagctgctttcccagcttgtggactcgctggacttgtcgggagccaaatacacggtcctctatgcgtcccaaccgtctggtttgctggagagcccttcgggcctgccgctgggtaggcatctcgcggagaagaagactaacggcacgaaagctgtccagggcgaaaaatgcgatggcgagtgcctcgtcaaatcgagtctcctcgaaggaactttcgttgggatagtgcttctcatcatcctgatatcaggactcatgtgcatgatgggcatcgatactccctcgaggtttgaagctccccaggagtcttgatctctcccttggactgcagaatccgcgggggggttgtgacgagggcacgcggcggcgttgaggggggccggtgttctgttggtgtgcactgtggatatatattgtttagcttcccatttggaagggagtacgccttgtgtattttttttaccgagccaactgtcactcacgatgtgctagaattttttggtgtaatatttgcgtttcgcgcctatggacaactaataagctgaggcattgcagcagataaattcatgtgctgcgtgaggcaggcttgtgttgtgtaccagacgcacagcattgttgcctccagctagtgctttctgtgtgaaataaacctgaaacccagtcccaggccaccgcaccaataaagatgggtactatgcatcaatcaaaaaaaaaaaaaaaaagcactaaaaaaaaaaaaaaaaataaaaaaaaaaaaaaaa

SEQ ID NO: 5196 - DNA, 2870 bp, Zea mays
gatattcccccaccacccacaccgagccaccgaggcgcggcaggaaggaaaacagcgctgcggcctgcgggaatagagtgtgtcgctgtaaaaacaggggagggggacgcgcccgctgccagtgcctgccgcacacgcgtgacgcgtttagcctttaagtcccactcctcgccgccccagatctccgccctcctcaccactgcccccccattccccggcgcccagcacccggcgccgcaaccgccgcagtccggagcaagatcggtgggtagacggacgggcgacaggcgggcgggcgcggctctgtctgtatctatctgttggtgggagaccggttgtgtcggttaggcggcggcgggtgggaaggaagaatggcggcgggcggcagatccatcgcgtgctttgccgccgtgctgctcgcggccgcgctgctcctctccgcaccgaccaccacagaggcctacgattcgctggatccaaacggcaacatcactataaaatgggatatcatgcagtggactcctgacggatatgtcgctgttgtcacaatgttcaattatcaacaatttcggcacatcggggcacctggatggcagcttgggtggacatgggcaaaaaaggaggttatatggtcaatggttggggctcagaccactgaacagggtgactgctcaaagttcaagggcaacaccccccattgctgcaagaaagatccaacaattgttgatttacttccaggcactccatacaacatgcaaattgccaattgctgcaaggcaggagttataaatacctttaaccaggacccagcaaatgctgcttcctccttccagatcagtgttggtcttgctggaactaccaataaaactgttaaggtgccgaagaacttcactcttaagactccaggccctgggtacacatgtgggcgtgctattgttggcaggccaacaaagtttttcactgcggatgggcgcagggtaacccaagctctaatgacatggaatgtgacctgcacatattcccaatttcttgctcagaagactccgtcctgctgtgtatctctctcatcattttataatgacacaattgtgaactgcccgacatgctcatgtggctgccagaacccaagtgggtcaaactgtgtgaacgaggattcacctaatctacaagccgcaattgatggtcctggtaaatggactggccagcctcttgtacaatgcacttctcacatgtgcccaataagaatccactggcatgtgaagctcaactacaaggaatactggagagtgaaaatcactatcacgaacttcaacttccgcatgaattacacacagtggaacttagtcgctcagcatccaaactttgataatatcactcagttgttcagcttcaactacaaaccacttactccatatgggggtggcataaatgatacggcaatgttctggggtgtaaaattctacaatgatttgctgatgcaagccggcaaacttgggaatgtgcaatcagaactgcttctccgcaaggactcacggactttcaccttcgaaaagggatgggccttcccacgccgagtgtacttcaatggtgataattgtgtcatgccatctcctgaaaattatccatggctgccgaatgcaagccctctaacaaaacaagcattgacactcccactcttgatattctgggttgccttggctgttctgttggcttatgcatgatgagtgggatcaagatgtttagcaagcttcaagttgatgtcggattccatgaggtgcactgcaacgggatatttattcattcaattccatagcggcacaggagagatgaggcgaagccaagaaaaagtggatgtgtgtgtgtgtgtgtttgtaagttaaagggccaaaatgtatttcttgtctggtagtatatagcagctctacaacactttggtgaacttagttactgcaaattaggcaattacagttgcaccttttgtattttatagcaaacccagacttctattggattctatgactgcccctcttgtagtaaacgcaaggcttcactggtactcctgtttaaagattggtcaaatagaagagacgacggtgattgtctgattgagataactaagttctggtgtcttgatccatttgaccattctgctgcaaagattattgagctaaattgctaataacaagtgttaactgttgactgaaccaaaattacgtgtgcaaaagaaacaacgaaccacaataagactgtctgcagtagataagataaaggagacgcaggcactgtttacatagtagagtttaaaatattacaattatatgtctcatgttttactctgtttattatagatagtctgagtccggcagcgggtaccggaaacgtgtcgtggatgcgtattattcgcggcgtgtggccctgtggatgcatccagcaggtgaggccatggacgtgcctgctatagaaagagagtgcggtaacatccgcatcctctctcctctgtccattcacatcttccctgttttcgtcggtacagacatgctgacgcgcagtccgaatacggtagctactggatgacgggcctcctatccgcgctcgctgatgggtcccactgcagaacgaggtgttttccgcgttggggctgtctccaccaagggccctaatgccgactccagcaagaatcgctgcatggttctgaacctcagctaaaatagagtacgagcagcgcatgcaacgatacgattcttgtttcgctattatttattaagagaatatagtatgttaatatagttggtatattatagaggataaaatttagaatacgctgctggagatggtaaagatatagaagacgatttttttagagtgaactg

SEQ ID NO: 5197 - DNA, 2687 bp, Zea mays
ctgtatggttattccatcaaacaaagagtctgctgttgccaacaaaaaccttgaaggtgtcgcagaaagtgatgatgatcttattgatggtaccgctgataatgttgtatcgggacctaagattgccaacatggtagttgatgaggtgggtttcaagatggcacctgctaatagaagttcacctggtgacccctctgatgactcatgtgtcattcctgaaagtaggcctcaggattatgctgtaaagagctatgagggagttggtgattgtggtgtgactgaagtgtctaagttatgtagtgagcctcttaacaaaccatcagataatatatgtgcaactcaagatgttcctacaaatacctctactatgtctgctggtgccagtgaagtgtctagttcgtggagtgagcctgttaccgaactgatcgatgacagatgtgcaactcaaggtgttccagcaaatgcctctaccacgtctactgttgtaccatctgttaaactctggacaaatgctgggctctttggacttgaaccatccaaacctccagtatttggtaatggtccaagggaggatactccacctggttttaaagaagctcaaccagtccattcaactgaattcacagaagtgcactgttcaaagccaactgaatcagcagctgtagatgtcccaaatggaaacacatccattaccagcagctttgtggaaaagcttgttggtattcgtcctggttctgcaaacctcaatagctcaggggcaaatcaatcagcagccagaatacctgatccaattcatagtcatacagatgggcactcagatttttcgtcatcctctgtgcgcacctccaggccggccgggcatacttcaataaacgaacttctagaatttgaggggagtgctgatactggcaccaaaatatactcaactgacatgagaaataacgctgtgtctgcatcaagcttttcaagcattgcacaaaggtttcttgctaatacacttcagagaagaacttccaaatatactgatcttcctatgtcttctgagagggcaaatgctgatacaagtgcaaaatctgaatctactctaaatcctgttgtagaaccaagtgaagcggtatttgcagaggaaactaagtttgagaacaaaacagaaaatggaatggatggattgtccaaaacatcaatattttctagccgccattactctgagaaatcgtctccgccacttgagtacatgaaaatatcttttcaccctatgagcgcatttgagatgtcaaagctgaacctagatttctgtgatggaaatattcatgaaatttctgatgatatgatgttaccgacatttcagttactttcagagtcttccattccacagccaggcagtggttctgagtctgaagatgacacctttggtaggtcatatagttattcttcatatgatgatctgagtccccggctatattcaaactctgaggcatgggatcaagatgatggaactggactggaggaacatgagttatatgatgattcaaatcagataggatcctcaacagcacctttatctagctacatgggattcgagcagatgaacttatctgacatgaagtcagatatttcacttgcaaacgttggggatcagaatgtaataggcactttacaatcctgtactgttgaagaacttccaaactttgatacattgatgtccagaagtgatgatcaaaatggtgaaacccccattccacataatctggggaatatgacaccagatgaagatcagttgccaccaccacctcctctccccccaatgcagtggaggatgacaagacaaacaacttcactagaagaggaaacttgcattacaactaaagatatgcttagaaaaacttctagcctaccacatatacacacctctgcccaggaagaacactgtcctccaactgcaccattggatctacaagggcatgctggggaagtgggtgtccagaaaactggtggggtacgagaaattactaatcctcctagtatcatcgatataaaatcaagtttgcttcagcagatcagggataagtcagagcagctgaagcttaatggacatgaaaggtcaaaaaaagcagtaggcggtgacattaaaagcttagacgaaagggaggagttgcttcagcaaatcaggagcaagaccttcaatttaagacgcacaaacgcatctaaggcagatggctcatcacaatctacagccagttccaacgttgcagcaattttggagaaagccaacgctatccggcaggctgtggccagtgatgagggtggcgatgatgatacatggagtgatatatgaccacctaattgcagacgtgcatggtagtcttttcctgtatattaagctattacaagatgaagtgattaaatgtgaataccatccttttcttcattgtaattagattttgcaggtcttgttttgtaccttccttagttcatattagtgaatcctaccgtaggtcgctgtggtcgtggaaatgtcagagcatttccacattatgtaaatgcatctttattatttatttatgatagtgagaacagctgaatagctgataaaaataagcatactaatctatctttttatcattgtattgattttttttgcaatgataataagatggagcatgatgttgcaaaaaaaaaaaaaaaaa

SEQ ID NO: 5198 - DNA, 1245 bp, Zea mays
cagagaaaacaatagctgcatactacaatcttttgaaatattcagttttttttggttggttcggatggagctgatcaaagtcatcgttctgctaaagtttaaaaaccaacaacgtttgcatcatgtcaggtacagagtagtagcatacagtgatctcctcaaagaacagagtatttgtaaaaatatggaagggacagcaatgctactagcacagggctcataatccgtacagcaatcttttagctcgagctctgcctttctgaacgtttcaagtgcagaatccgattcactctgattttgccggagaacaagatcggggcagactcttgctcctggcaggactcctgcttgcagacttgtcacgccggggagaaataggaggggatctggatggtgatcttgccttaacaggtgattttgactctgaagcagatctagatcttgggctcctgctcttgctataactgcggcttctgcttcttgagtacgaatggctgtggcttctgcttcttgacttagagcggtttctgcctctggagcgagaacggctgcgcctagcatcatactccctcacccggacatatgtccttgaaaaagcattacggaactcagaatcatctagcttccttatcgcgtgtttcatatcttcatagttagtataatcagctattccaatagttgctccagcctcacgatacacatcagtgaaacagacatcaccagctcgccgcatatggtccttgagatcttgccatgatgctgaagaaggtaatccagtaaccataacacggtaatcagaacgttttgaggcaccgcgttgtccagcactgctatagctgctagatcgatcaaaagaagatgtgcctcgtccaccatgggctaattccacccgcaacctatggccatcaaagttgtatccatcacggccatatattgcatcttcagcatcacgtgcgtcctcaaactcaacaaaagcaaaaccaggaggccttggtggaattttcaagtcaatttccactatacgtccatacttgtagaagagatcatccacttccctctcgcggatgtcgccggggaggttgcccacgtagatcgtacagccgttccgccgggtcatcgttcctgcgacgactcgacggcggcaaggagcaaggaaggcttgagtcgaggtcgagcagcttcgacggatgccggcgtgagggtactgggaattgtggattgttcccttttacggcccgagggtac

SEQ ID NO: 5199 - DNA, 4977 bp, Zea mays
  misc_feature (488)..(488): n is a, c, g, or t
  misc_feature (569)..(569): n is a, c, g, or t
  misc_feature (605)..(605): n is a, c, g, or t
  misc_feature (685)..(685): n is a, c, g, or t
ggccacttgatcacgatgtgattcctagagatattagaactccctgttgtgcttattcgagctccgacgtacatattagctgcccatttcaatggcccgctgtaatttagtgggttacctaatggtgccattgattatttaccatcaaacattcagtgaggtttttaggatgtgatatctgtatacgagaagattacacattccacctgtgcaagtggaactagtttgtactctctgttccaaattacacatccttatgccttctcaagatacatagcttttattatgtacctaaacataatgtagatcgagagcaaaagttatatctagaaaaactagaacagacttacaatttagaatggagtgagtatttcctagcaagggtgttgcctttccagagcagaacaaacatttgagcttatgtctagtgctctcatttttttatgatattctttattttggcataacacaactttaacaaaatatgngaagattgtcaatgaatcattgtgcttacatggtaaaaaaaaccaacccagtgggggggggggggcacagcggcaccgtancccatgtgagaacggatgagtgaggccgggccttanaactttgctttggtgtgggaccgatgagaggatttttgtaaccccggcctaaattccctacaacggggaatcgaacttanaacgtaaggagtgctactcaggtcacctaaccaatttagttagaggcccttttgcgtgcttagacagtatggctgaattaccgctagtaatactatgaagtgcctgtttacaactattgtgcagttccgctccatcctcactggcaaacatcaaacttttgccatggctgaagatgggtaggtaaagttgtcccaccggtgctaaacaggttcatgtcacaatttttgtggtaaattcactaatgtgggaagtctgagtaccatgagtgtgaagttctccagacacactgatcctattcatttttaaaataaaaataaggcttcaaaaagaatgctcagatttgtaatcttattgaatatacttgctgaaaacgcttgagttcacctgtttttcatatatttaaagaattccatctgacctggtgttgttggagcatgacaaatgtcctttgtctataatgttctttgttattttgttaacatgcaatctgaaataagattgtggaaaatatattcctgtatcagttgttttggagatattttcaaatgtatagttcatacttctcatctgaccaagttgccattgataagtctgggatgccaacttacaactattgggcaattttggtcctccatctttgtgttatggactttttctgttagactgacatatatggtgtgtgtatatacggtatgggtatgtttaaggtatagcagaccggcccatgtatatgttagattgtcatatatggtatgggtacatgccaggtatagcaggccagcccttgtatatgattggaaagatacgagaagatctcatctggttctgtttccataagccacaagatctctcccttatttatatggtctctccaataaatcaatccattattctacgctatttcggttgctttctggtatcattcgtctaggtttagcctttcgccttttgccaccactgctccttgtgtgcgcctcatccactgtactggctactatggctggtgatcctcctgcactgcctcctggcgctgctgcttttcgcacagccgtcggcgccggcacgatcactgccgatatggaggtgtggagattcttcatgcactcgttcctgtacgtggaatattttaatcagcggtgtagctcatgttcagatcatctttgcagttcatttttgtgtcttacacttagaatttgactgctccaatgtgctccattcaatttatgcgagcagtttgatttccgtgtatacgcttgggctgctctaacactgcatactttgtactggtcttgaatgagtctgacccccattggacctagaatggggaacagatgtccttttttattcttatatgttctttaatcattgaagcatgacttgaaataaaaaaatatggaaaattgtataagtatcactgtgtccggagagctttccaaatgtatgactgcaggtttcccacttgaccatcttaccactaataatattgtggaatgtgcctgtgaataactccatgtgtgatagactgatagttcatatacaggatagtgtcacagtttttgtggtaatttggcagcatgggaagcctgagtgctacaggtgcaaagctcttcacatacactggttcttggtcaattttttctgaaagaaactagaaagctttcaatggaaaccctcaacttgatggcttgatgctttgttctgttcttcgacgagtcttgctgaatacacctgagtttgcctgaggttctcaaattcagaaacactggctaacctagaaaggttggaacaagacagatgtccttttccatgcttttagcaaaggagagcctaatataatatatttcctggctggttcacctcttaaggtgtcatgtgccaaccttgggtggaacagtctccacattgggagtggtggccagtgcccttggatagaggctctgcagcccattacctgtgcacaggtgtagtttggttcgggactgactggacagaaagtagaggtagagttctgctagtggtaaaccagttatggtcacattttttgtgttatatatggcggcagtgtggataatcttaagtgctcggagtgcaaagctctcgcacactgagccatggtctatctgtgttagaaaactggagggctttagaggagtccttgacttggggctctgtactgttcttggaagagacttgccaaagtacctcagtttatgggttttgcaaaaataaacccaggctgtcctaatgatgggaacaacagaatgatctagtttggtgaccaatttcactatttggctacaagggaagtgaatacatggagggaacatgtaaatccgtcgagaaataattcaaaacttgaatttgtatactcatttcatgtaaatggcatcaaatcttccccaacgtcattaacagctgtgggtcacttccgcaagctgagaactgacaccatgcattgcatcttggtttccatcccactgcagctcaaaagatgttacttacatgctgctgctgcatgttgtcaaacataagtttcttgggccatctgtttatctttttgggacactcatgtttgaaccgtacggattcagcttttgtacaaggtatggtcaggaaaatatgtatgttttgcactaggcatgtaagtagtgcttgggcctaaattcagtcactgcttgatgtatatgatccatagttttaacaattaactataaattgtaactgaatttgatgagttctgtgctccacacttttaacagttaactgtgagttgtaactgaacctgatgggttctatgcttcaagcgttcgaccttgggggccaccagatcgcccgccgcgtctggaaggactactacgccaaggttgatgctgttgtgtacttggtggatgctgttgacaaggaacgttttgccgagtcgaagaaggagcttgatgcgcttcttgcagatgactcccttgcaaacgttcctttcctcatactgggcaacaagattgacatcccatacgcggcttcagaggaggagctgaggtactacctcggcctgagcaacttcacaaccgggaagggcaacgtgaacttggccgactccaatgtccggcccctggagatcttcatgtgcagtgtggtgcgcaagatgggctatggcgaaggcttcaaatggatgtctcagtacatcaagtgagtcgctgctgtcctcttttgtccatggcgctgctgctttcgcaggagggttgaaatcaagtctggtcgtgacatggcagctgcatggaaaggtttatggtagctagtgataggcaaagcttgtaagtcggtgttaatcctagatatgtgatgtggggtctactttctcttctgattgtttcttggggtggtctaaacggttcaaaaaaaaatgcgacttcttcgggtcagctagaagttatgtaatcacgttacatgaagcagcgcattgttcgccagctgctttggtgtggtggacttctgtcggtaatggtgagcttgcggtttctaaaagtatgcgtgtagactgtggtaattgtgtatctacagattccaaaccttgcatttgctgttgactgaggtagcccggaaatgataaaacatcctggtgaaagttgcattgctttcatgttgcgttttcgttggaacgaagcagcacaccaacccgaacgctgctattcatttcaatttgaacatttaaaagcaccttgggcttcgtttggctaaccgtgtattgtacacgcattgttagagcatctgagtcctaaacggagttgtaggacatcaaaaacttgctttaatagggttctattttacaaaaaaaaaatatataggaaatattaaataaatataggactcagtctatcagatcctaagtataagatctcgtatgttcgagcacttttttatgcttctaaacactttaaattagatcctactttaaattttaggacgccgatgtaggactactggttggagacgcttttaacaattacacccgtcactataaggaaaatggccaaaataacttttattcatatgccgtaaaaaataaccttatttttggtgaccgacaccaacccatagaaaaataaatttgttattatcagtggttaggtatcagccataaaaaataagcttattattttttgtggccaggcatcagccgataaaaataagcatttattttcaatagctgacatgtgcccaccagaaattagtgttgaggaaaagggtttcatttgagggttgatttggtgacaaagggatcccgagaggatgggagggg

SEQ ID NO: 5200 - DNA, 2068 bp, Zea mays
gccccccccccccctttcttccctttttttttttttttttgaccggtcaaaatgcagagagccggcacatccgcaatcataacagctgcgtctgttttttggtgccaaatcacaagcaaactactcctcaaccaaaccatcactgccaccaccagcagccaaattaggtacaacaaggctaataatcattcgaaaatgacgttctcgcccgtttctgcaccactacaacaacaataacaacaactggaaggggtgggctgcaacccaaggggtgttcaattaccattaccattacggcattaccattaccgatcctgcgcgagaagagggagcaggagcgcaggcacacgaccacaccctaccgcctcagcactggcttgtaaagcacgacggtcacgaacttagccttgaaccggtgcgtgatccccagagcaaccatggacctcgtgttctctttctcgatgtaaaggtggttcagaaccacggtctggggctggggcagcgggctcgactcgtcttggcttggtgggaagctcagcagcgtgtgctgcagatgaggtggcatcagtgggggctcccggccttcgtcttcattcccaggaacagggttgtcgtagctggaatccggtgaaggcgggacttcaaatccaacaacgtggaccccttcatggtcatgcatgccttgttggtccatattccaacagcctgttgccttgtcctgctgggtgctcctccctggcgctcctcgtgctaaagaatttaacgacaaaaaaggaatctggactatcatgcttagtaggctcttgagggtcctcattggttttttacagaaacatctactgcagattgcatgtgttgcacacgttcactaaatgtttcgatgtcatttgtatgtaactggaagtagatgtcctttgtgctactcatccatagatttggaaatctattgattctattcctcatcattacgaagtcagacacactctatttgtccctgtattgtggtgattactttcctttgcagttaactggaatggaatttatatctggtgtaggttgagacggtctcactttaagattatctggctttgctgtgtactgcaacaagtcttgaaagcttttaagattatagaccttgttagtgcttgggttctatgtactcccgcgacctcttgcagtatgtgttcatgagacctttttcgttacatgagtagtagttacttcaagtctatgttcagctgtgcgttctttgttttaggttttggaatcgtcagagacaatctgtgataaggtttatcaggttttggaatcgtcagagacaatctatgataagatttctctgagagacaaacatacaccacatgtttataattcgaaaaggtcagtccatttatttcttgttgtactgaaacaaatccgataacagggtcaggttggtaatagctctctatgttgttggacagtgatagtagctgatttacccctgcaggcccccaccgtcaatcagcgtccctccccctaacaccgcaatcagcacacctttcctgatgcagacagtttccaatcgaagtctcttttccatctttcctgagacagttctggttgattttccatttctcttttttttccagtctgaaacgaaccgaactaatgctgcaacgtaccttacctttagaattggtgtcaagtagagtaaaactatataggataccaaaactatctttcattgtgcatttttctcaagcagagtaaatatcagcattttctacttgttagcagtgggtaggggatgcacatgtttgcgtgtaggactgtgaataacaccgatgtttcacatatccctaataaccatcacccttatgcagtttgattctgatgcaattagttcatggatggatatgtttttgcgctgtccatctctagaatgagttaaaacatatttcttgctcatgggagtactgcaactgtaggccattatctggatgtctgcagtattatctcaggcaatactactttgtttgtaggaaccaccgccagcaaccatgtcccactcgttgagccttggcgc

SEQ ID NO: 5201 - DNA, 3905 bp, Zea mays
  misc_feature (3875)..(3876): n is a, c, g, or t
  misc_feature (3883)..(3883): n is a, c, g, or t
gcggttggaggggggcgatgcggactccccgtacagctccacggcggtcacagcggcggaggaggaggaagtgggggagagaggtggaggaggagacgaggtggattcagcggccacggcgacgccgaggcggttgtcgccgagggcagcagcgagccccacggaaggcgacgcccggtggggtgacaccagctcgtacggcgctaagaagaagcatagagttttttgtcagcttccgaatggcgattgggcattatgcacacgtcaattacttcctctggtgcatgagtcggttgtaaaggtttctgaagggaaggtactgagattgaaaaccgagtgtctacaacctgcaaatcctgaaattcttgatggagtggatgatcttatgcagctaagttatctaagtgaaccatcagtactgtacaatctgcagtacagatactccaaggatatgatttatactaaagcaggtccagttttggtggctgtcaatcctttcaagaaagtttcactgtatggtaacgagtacatcgatgcatatagaaataaatcaatggatagtccacatgtttatgcaatagcagatgcagcactttgtgaaatgaaaagagatgaagtcaaccaatctataattataagtggtgagagtggagcaggaaaaacagaaaccgcaaaaattgctatgcagtacctggcttcccttggaggtggaagtggcattgaatacgaaattcttcagacaaatccaatactcgaggcttttggcaatgcaaagacattgagaaatgataactcaagtcgttttggaaagcttatagaaattcatttcagtaccactggaagaatatgtggtgccatgattcaaacatttttgcttgagaagtccagagttgtgcaatgtgcagttggtgagcgatcataccatatattttatcagctgtgcgctggtgcacctgcctctctaaaagagaagttgaatttgaaaaaggtggatggatacaaatatcttaagcagagctgttgctattcaattgcgggtgtggatgatgcccaaatgtttcgaactgtgacgcaagctatgaacattgttcatatcagcaaagaggaccaagagagtgtttttgcaatggtctctgctgttctttggctgggggatgtctcgttcacagtaattgacaatgaaaatcatgttgaaatcatagtagatgaagcttcgaaaacggtttcagaacttcttggctgcagtattgaagatctcaatttagctttatcaaagcgccacatgaaagttaataatgaaaacattgtccagaaacttacccttgctcaggcaactgacacaagagatgctctggccaaatcagtgtatgccagtttgtttgagtggcttgtagaacaaattaataagtctctctcagttggcaagcgtcgaactgggagatctatcagtattcttgatatctatggctttgaatcatttgataagaacagttttgaacagttctgcattaattatgctaatgaaaggttgcagcaacatttcaatcgtcatttgtttaagcttgagcaagaggaatatgtggaggatggcatcgactgggcaaaggttgacttcgaggataatcaggactgtttgagcctctttgagaaaaaaccactgggactattgtctgtgctcgatgggccccccccccccccgaatgccacagatcttacttttgcaaacaagcttaagcaacatcttgactcgaattcttgcttcagaggggaaagaggcaaggcatttgctgtccgtcactatgcaggagaggtggcttatgatacttcgggttttctggagaagaatagagatttattgcacatggactcgattcagctccttgccaaatgcaaaacttctctgccaaaaatgtttgcatcgaagatgctagttcaatcagataattctatgtctgctccatatagatctagtgctgctgattctcaaaaactaagtgttgccatgaagttcaagggtcaactgttccaacttatgcaaagactggaaagtacaacgccacactttattcgttgcattaaaccaaacaatttacaacttcctgcaatttatgaacaaggacttgtgcttcaacaacttaaatgttgtggggttcttgaggttgtccggatttcaagatctgggtatccaacaagaatgactcaccagaagtttgctcggcggtatggttttcttcttgaggatgttgcatctcaagatccactcagtgtttcagttgcaattcttcatcagttcaacattttacctgagatgtatcaagttggctacacaaagttgttcttccgaactggtcagattggcaaccttgaagatactcggaatcgtactctgcatggtattttaagggttcaaagctgtttcagggggcatcaagcccgtcatcatgcaagagaacgaacaagaggagttttgactcttcaatcattcattcgtggtgagaatgcacggcaaatttactcctctttgttgaggaaacatagagccgcagttgttttgcagagaaatgtgagatgttggcttgcaagaaggtatttcataaatgtccggaaggcctcagtgataatacagtctggtattcgtggcagtcttgttcgaagatgtaatggcaatattgatctaataaatgtgctaagagagtttgaatcaaaacaggaggcacatggtgaccaaattttgatcaaggcctcagtcctggctgagttacagaggcggatactaaaagccgaggccacagtacgtgaaaaggatgaagagaacgagatgcttcatcagcggcttcagcaatatgaaaaccgctggttagagtacgaacagaaaatgaaagctatggaggaaatgtggcagaagcaaatgcgttcgctgcaatcgagcctttccgtagcaaagaagagccttgttttggatgaaacgcctaggatgtcggactcatcagtggatcagagctgggaaagcaatgggaaccaccatgtcagcagcggttctcagctggtgccacacactggtggacgtgaaatgaacgctggcctcagcgtcatcagccgcctggcagaagaattcgagcagcggagccaggttttcgctgatgacgccaagttcctggtcgaggtcaagtctgggcaggcggacgccagcctaaacccagacatggagctccggaggttgaagcagaacttcgactcgtggaagaaagatttcagtggacggatgagggagacgaaggtgatcctgaacaagctcggcaatggcaacgagtcatcgcccaactctgtgaagcggaagtggtggggcaggctgaacacctccaagttttcgtgagtttattatgtattaattggtaatttgtagatgtaaccggtattttacacgccggtgtggttctagcttcctagagtttctactctacgggtgctgtgaaagtccagtgtgttggactggatttgtattccacggagggcgagttgtatagttctcccacaatggcttccttttgaggggtcaaggaccactgaattgtgatgtaattacttgctgaagtagctgtcgaaggggggagattgtgagtgcttaatattccactatcctcgtgctttactttctgcccctcgcccgaagcacatcccgtcgcatcccatcccactaccacccatctcgtcgtccgccgattcgatccggttcttccaacccaagggcagtgatggcgacgaagaggagcgtgggcaccctcggcgaggcggatctgaaggggaaagaggtgttcgtgcgcgccgacctcaacgtcccgctcgacgatgcccagaagatcaccgacgacacccgnnatcgcgnctccgtcccccacatcaagttc

SEQ ID NO: 5202 - DNA, 1981 bp, Zea mays
  misc_feature (806)..(806): n is a, c, g, or t
cattgggtacctcgaggccggccgggatccatctatccatcaccaccacctcctccttcccacgactcccgagcgctctgcgtgtggcgcgcgcggcagcatggcgactgcgaacgggagcagcaaggggtcgttcgaggtgcccaaggtggaggtcaggttcaccaagctcttcatcgacggcaagttcgtcgacgccgtctccggcaagacgttcgagacccgggaccctcgcaccggcgaggtgatcgccagcatcgcggagggaggcaaggccgacgtcgacctcgccgtcaaggccgcccgggaggccttcgacaacgggccctggcccaggatgacgggatacgagcgtggtcggatcctccacaggttcgcggacctgatcgacgagcacgtggaggagctggcggcgctggacacggtggacgccggcaagctgttcgccgtgggcaaggcgcgggacatcccgggcgccgcgcacctgctgcgctactacgccggcgccgccgacaaggtgcacggcgcgacgctcaagatggcgcagcggatgcacgggtacacgctcaaggagcccgtgggcgtggtgggccacatcgtgccctggaactaccccaccaccatgttcttcttcaaggtagggcccgcgctcgccgccggctgcgccgtcgtcgtcaagcccgccgagcagacgccgctgtccgcgctcttctacgcgcacctcgccaggggaggccggcgtccccgccggcgtgctcaacgtcgtggccgggattcgggcccacggccggggccgccgtcgcagnccacatggacgtcgacaaggtcagcttcaccgggtccacggaggtcggccgcctcgtcatgagggccgcggccgagagcaacctcaagcccgtgtcgctcgagctgggcggcaagtctcccgtcatcgtcttcgacgacgccgacctcgacatggccgttaacctcgtcaacttcgccacctacaccaacgagggcgagatctgtgtggccggcacgcgcatctacgtgcaggaagggatctacgacgagttcgtgaagaaggccgccgagctcgccagcaagtccgtggtcggagacccgttcaacccgagtgtcagccaaggcccccaggttgacaaggaccagtacgagaaggtcctcaggtacattgacatcgggaagcgcgaaggcgccacgctggtcaccggagggaagccctgcggcgacaagggctactacatcgagcccaccatcttcacggacgtcaaggacgacatgacgatcgcacaggatgaaatctttgggccggtgatggctctcatgaaattcaagaccgtggaggaggtgatccagaaagcgaacaacacccggtacggcctggccgccggcatcgtgaccaagaacatcgacgtcgccaacaccgtgtcgcggtccatccgcgccggcgccatctggatcaactgctacttcgcgttcgacccggacgcgccgttcggcgggtacaagatgagcgggttcggcaaggacatgggcatggacgcgctcgacaagtacctgcagaccaagaccgtcgtcactccgctgtacaacactccatggctctgaccgacctcatcctgtccgatgaacagttcaacatcacaaacaagaagaaacatgtcttgtaagatactcctccaaaggatcggttgcctgtacctgtactcttacacctgcatggattgatgatgcagtgcaatgtagcattcagaacaataaagacatgtttcggactgctggtgtctgatcggttgaagagcatgtttcagtattactatttcttttcaccgacaaccgcgttggtttctgcggcccattttttggtgcctattttcgcgataggaacttatggcaatataatgcttggcatatcatatccaaaaaaaaaaaaaaaaaaaaaaaaaaaaaaaagaaaaaaaaaaaaaaaaaagcggcc

SEQ ID NO: 5203 - DNA, 2205 bp, Zea mays
gcgcggcgctccgggcggccggccgggaatctcgataggggtgcgcgaggacgaggagaaaaaacagaggaggaaaaaatatcaccttctcttcctgcattcccctgctcgatccccggcgaggaattcgcccccgaatccatcgatttgctcagtccagtccgccgatccgtggatcgattcgtgcgtgggctctgtcctccccggggttccgatctggtcctcgcctcgccggaggaggagctggaggagatgaacggcaccgggggcagccaccaccagcagcagcacaggctccggcagcagcagcagcagcaggcgctcctgatgcagcaggcgctgcagcagcagcagcagcaacatcagtaccagtccggcgtcctcgccgccgcggcagccgcggccatgacccagatggaacctatttccaatggcaatcttccacctggctttgatccttccacttgtcgcagtgtgtatgttggaaacgtgaaccctaatgtcacggagagccttttgattgaagttttccagagtgctggccttgtggaaagatgcaagctcatacggaaagagaagtcatcctttgggtttgtggactactatgatagaaggtctgctgctctagcaatcatgacccttcatggccgtcacatatatggacaagcaatcaaggtgaactgggcatacgcaagtacacagagggaggatacgtcggggcatttccatatttttgttggtgatttaagttctgaagtgaatgatgcaactctttatgcctgtttctcagcatatccttcttgttctgatgctcgagtcatgtgggacaacaaaactggacgttccaggggttatggttttgtctccttccgtaatcaacaggaagctgaaactgctataactgaaatgactggaaaatggcttggaagcagacaaataaggtgcaattgggcaacaaagaccaattcagaagagaaaccagaaactgacaatcataatgcagttgtactaacaaatggtagctccaccaattcagcaacagatgcaagccaggatgcaggaagtaaagagaacccagagaacaatcctgattgtactactgtatatgttggcaaccttggacatgaggttaatcgggatgagcttcaccgccacttctataacttgggggtcggggcaatcgaggaaatccgtgttcaacaggataaggggtttggatttgtgagatatagcacccatggggaagcagcattagctattcagatggccaatggattggtagtccgtgggaaatcaattaagtgctcatggggaaacaagccaactccacctggcaccacctccaagcccctaccccctccagttgcttcataccagcctgctgtagcaatgtcaggtgtcccacaaggtttcacagcagccgaacttcttgcttaccagaggcagcttgccttaagccaggctgcagcagggcagattgctggccagcatggtctcgcgggtcaggtttctgcaggtcttcttgctgctgctggttctcaggccctctacgatggctacccgaaccagtcatcagcccagcagcttatgtactacaactagagttcaagaggacggcgttggccatcgtcgccctgttttttattttgtggttcatgtactatttgtgtgagagttcttgatctcttgtcgccgcggaattgtgttactatcttattactgtaccattgaccatttttcttgtgagatccatttgagtagtcactttaacagagtaagagatgtattctatgtgacttcgcgattgattaatgtaatgctcccctgtgcatcggctttggtcgctgggctggttcctaacctggtgctatggtgcggttggacattgagagttttactcgtttgtagtttggtgttctggttcgtgagtctcatgtgtggttgcatatgttcacctaacctcagaaattcatcgttgtgtccatacaacaagatggaatttattttgcaacctgagatgccatgagagccctttctggtccttctggaatgtaggtctgtcagtttgccatgggaactgttcactttccgtcaggcgtaaatcatcactggatgtatcacactgaaattcagagttccagatatgcctgtgactgaaggttcagtagtcgcaatcccattctgcgatggaattttctgggcagc

SEQ ID NO: 5204 - DNA, 2042 bp, Zea mays
cattggggcccccccccccccccggagctgacaaccagacgcgccagggtttcaggcttccacgaatctccccgccgccctcaattcccctcggcgccgccgcctcctcccctcgcttcggtcctcggttagttaaccatccaggttctgtcaagatgtctgatagccatgagactgacaggaacattgagatttggaaaattaagaaactgatcaaggcattggaatcagccagaggcaatggcacaagcatgatctctctgatcatgcctccacgtgatcaggttgctcgagtggctaagatgttaggtgatgaatatggtactgcttcgaacatcaagagtagagttaatcgtcaatctgtgttggctgccatcacctcagctcagcagaggttgaagctctacaacaaagtgcctcctaacggattggttctgtacactggaactattgttactgaagacggaaaggaaaagaaagttactattgattttgagccattcaagcctatcaatgtatcactctacctttgtgacaacaagttccacactgaggctttaaatgagctcttggaatctgatgacaagtttgggttcattgttatggatggtaatggtactctttttggcacactaagtggcaatacccgtgaagtgcttcacaaattcactgttgacctcccaaagaagcatggtagaggagggcagtctgctctgcgttttgctcggcttcggatggagaaacgccataactatgtccgcaaaacagctgaacttgctacccagtttttcatcaatccagctactagtcagcctaatgttgcaggattgattcttgccggttctgcagattttaagactgagctgagccaatctgacatgtttgatcagcgactccaagccaagatacttaatgtggttgatgtttcgtatggtggcgagaacggtttcaaccaagctattgaattatctgctgagattctagcaaatgtgaaattcattcaagaaaagaagttaattggcaagtattttgaagagatcagtcaggatactgggaaatatgtctttggtgttgatgacactctgaaggctcttgaaatgggtgctgtcgagaccctgattgtgtgggaaaatctggatatcaacagatatgtgatcaagaacagtactactggggaaattattataaaacatctgaacaaagagcaggaagctgaccagagcaatttccgtgacccatctaccaatactgatctcgaagttcaggaaaaaatgtctctcctggaatggtttgccaatgaatacaagaagtttggttgctcgctggagtttgtgaccaacaagtctcaggagggatcccagttctgtagaggatttggtggcattggtggcatgttgcgctaccagctggatatccgttcttttgatgagctttctgatgatgacgatgtgtatgaagactctgactagcaatcagccaatctcatgccatgtgctggcccatggaaggacgcaacagctcgacctcgccatacctacgcaggagcacacgaaaagcaactatccaaggattaatgggcatgggccagcgtcatcctcttcaagaggagcttaagactaagatgattttgagtcacaatcatgggagtaacgtgacaagaagataccctactatatcacaattattccagtaatgcgtcgagaagataccgttgtttaagtgcacaaaccaatacagtgacgtgccaagaagttaccgtattttaaggatgtttaattttcagtattcgtcggggtagtactgtgtcaaaaacttatttgtacctaaaaaggccaaatattgccgttgccttggtgctttatgctatgttatcgtcttttgtgagtctgtgtgctaaggttgttgcttaatgctttgtgactcgcaagctgctactcttgcagtttttgcaacgacgaagctatgatatggagtacaattctgtgtcaacaaaaaaaaaaaaaaaacaaacaaaaaagtactctgcgttgttaccactgctt

SEQ ID NO: 5205 - DNA, 2595 bp, Zea mays
cccacgcgtccgccctcccggccgccggcgtccaggccagagtccaggctccaggactaccaccacttcgtctcgtcctcacacctcactccaccacctctgccttgcaaagccttccaccgatccgccgcctcgtccgcgcgctcgcaggcagcagtgtggactacccgccccatactccatcccctactcgaaggatacaccgtgagtaggcgtgatggtgcttgataccccgttttcgtgcagcttgttgctaattcgttttagtttgagggatcaagaaccaccttgttctttctttctttctttcttggaacaattatgatgaatcattgcaaatctcttgaatatatttttcactgtaaaatactgccttgcctttgagctccttggttcacgtgcaatgtttctttgccctccgattttgcaggacctcgagttaagttgggcgaggagaggtggttcattccagcagggatccttctcgtgagcccagtcgatctgaccgtccttggtatctgggggggttgttctgtactctctctttaattttagtgctgggatgtatcgcctttgggattttctgggtgatggccgtcttccccaccgtcccgttcatgcctgttgggcggacggctgggtccctccttggtgctatgctaatggtcctgttccgcccccgcgtccccggaggacgcgtacgccgcgattgacctcccgatcatcggcctgctcttcgggacaatggtcgtcagcatcttccttgagagggctgacatgtttaagtacctcgggaacctgctctcgtggaagagcagaggcagcaaggacctgctcttccgagtctgcatcgtgtccgcgtttgccagcgcgcttttcaccaatgacacatgctgtgttgtcctcaccgagttcatcctcaaggttgctaggcaaaacaacctgccaccacagcctttccttctggcccttgccactagttcgaacatcggctctgctgccacgccgatcggcaaccctcagaaccttgtcatagctgtcgagagtgggatctcatttggccagttcttgctgggagttttcccagctatgatcgttggggttctcacaaacgctgctatcctccttttgtacttctggaaatacttgtcggtggagaaggatcaggagggtgggcagcccacaggaccagaggtggttgccgacgatgaggttacttcccatcggttcacaccggctagaatgtcacatgtttcttctctgaatccagatgacatggattgcgtaagcgaaccgatcatcaggagcaacagtgtcagtactactgggaatgagaacctgagaagcagaagcatcaattctgaggctgacattcagcttgcgatcaagtctctgcgggcatcaagcatgtcgcatgagatggtagaggtctcgacggttcctgatcggagagatgaaggtgcatcctcaaggaagttcacaaggactgctagccagcaaaggagcgtgataatagaggatttagcaccctccccagagattaatggggaaaaggagaaagaaactgaagttgcagagaagagatggaaagtacttgtgtggaagactgctgtttatcttatcactctcggtatgctcattgcacttctaatgggactgaacatgtcctggactgcaatcactgcagctcttgttcttctggcactcgattttacggacgcacaagcttgtcttgagaaggtgtcatattcactgctgatctttttctgcgggatgtttatcactgttgatggcttcaacaaaacgggcataccgaacacactatgggagttagtggaaccatattcacgaatcgatagtgcgaaaggtgttgcacttcttgccgtggtgattcttatcctttcaaacgtggcctctaatgttcctacagtcctattgctcggtacaagagtggctgcatcagcggcttcgatttctcatggttcagagaggaaagcctggctcatccttgcatgggtcagcaccgtggctgggaacctcaccctcctaggctctgcggcgaatctgattgtctgcgagcaggccaggcgggcccagttcttcggctacaacctcaccttctggagccacctccgattcggggtcccgtcgaccatcatcgtcacggcgattggtttgctcatcgtcatcagttactgaaacagctgaaggcaaaagagcgtagtgtaagagaagcagaatggataaaaatccttccaataagaagtacatgtaaattaggcttgccctataactcaagtgtgtatcggtacgttatgtctccgtctgtgctcttgctcgtgagcaagcagcacatggctgaccgtgtagcttgcatttccattgcataataggcttatgaagaatgctttggtaatatgattttacagtctgacaaggattgtgaagcagaggcagtgtaccatcaagataatacttctggaagcatataaaaaaatttcgtatatttggatttcaaatccagtctgcttcagactggaaattcatattatcttctggaatcgtgctttattgtcagaaacatgggctaaaatt

SEQ ID NO: 5206 - DNA, 1574 bp, Zea mays
attgggacctcgaggcggcaggaagaatacagagaagctgcgaagtaaatcttggcaagatgcattaaggattgtgatgatcagcgtaaccaatcatttcccttcatttgaagcccttgctttggttcagatagaacggacactagaggatatatcacagaaactgcaactggttcaacgtctccatactcgctttctcttacttcccaatctccaagatgttacaagaaccatccagcgtccttctattcatgaatggtcaagcaatggaatgcaccgaagcatttgtttcgtcaacaaagctacgggttatattctaatcgcagagcccccaagttttttgacgatatatgatgttatcgcaattattgttagtcacaggttaggggcaccaatgatcttgccgattgcctcagtgtttgcatgcccagatggttcagagaaagaagtccttcaaattcttcacctgggttcagactttggagtttcaaaacgtgaagggagatacgacgcttcccttggagcagaattgttatctcaggatgctcggcaggtgcaattccttccattaagaccgttctatagtggtgaaattgtggcatggaagacaggcaaagagggggaaaagctcaggtatggtagggtccctgaagatgtaagaccctcagctggccaagcactttacagatttccagtagagacagctcctggcgaaactcgcatgatgctttccagtcatgtttactcatttaaaagtgtttcaatggctgatcttctgtctgcaccttcccaagtgaatggtgatgtggcattaggtggccaagagaaactcttggccaccaacactggcactgaagtcaccaaggatgcggatgctggacttgaatatggaaaagtatcttccactgaactggtacaagcagtccatgatatgctttcagctgcaggagtaaggatggatgctgagaaggaaacactctttgaggctactctttccttgcaagatcagcttaaagaatctcaagttgctctcttggtggagcaggagaaggcggaggcggctgtaaaagaggctgacgtcgccaaagcagcatgggcatgccgtatctgcctgaatgctgaggtcaacatgaccatcataccatgcggtcatgtcctatgtaaccgatgctcaagttcggtttcgcggtgcccattttgccggacgcaggtggccagaatgatgaaaatattcaggccataaaaaacattgaaggacgtttggtctgactaaccgcttcagcttgtgaatgtgttacgatatcggggctcggctcccttctggttgtgcgttgcattcctttctggtctgatgcatctcattattctccatcggtgatgattggtaatccgatatggggggtgcaagtatagttacgttgtacaggaacgatgcattgcagtgtacagattccaaaatgaaatcattttacacacttcgaagggcatcgatgtctgaagctggttttctcgtgcaatactttcagagtcaacactacactgccctggttatccattcagcatgtatggtggtg

SEQ ID NO: 5207 - DNA, 1210 bp, Zea mays
cattgggtacctcgaggccggccggggtacctcgtgcccgaccccggtgtccatcttcgaattcgagctcctccatcttccttcaccctcctctctctcgctgtttgaggagaactacctgctcctgctccctcttccgctcctccgcgctcccgctcgccatccccaggcttcatttcggacggggatggacgactacgcccgggagatgatggagctgaagacgctcgtcacccgcaccctcgagaagaagggcgttctcgccaagattagggctgagctaagagcaagcgtgtttgaagccattgaagaggaggatcgggtgatggagaatgatgatggcggtaatcctgctttgcttggtagctgtaatgaccgggctaagcaactgcatgcttcaccttcaggtaggttactaactgcacttgtttgcgaatacttggagtgggcgcaattaagtcacacaatgaaagtttacttgccagagtgtaacctgcccaaggacttctggaagaatgaactgaaagacttctctaacaaaagtggagctgaagggagcaggagtgctgaaagtggtccactgcttttagatgttctcgaaggttatctgaaatatgagaatttgtctcaagcaaggatgggcggcaggaggatgatgagttcagaatctgatccatcactaaatgctgaacatcggagcatgaggagggcaccatcagcatcagttgggaatctgcctcctatggggagacctatctcttcttcgcagcaggcatcagatcgcagaggggggtcttcagtttccaacacaaggaaagatgagtacaactggagatacgataccaccgatgatatatctgaagaggtgctgcgggcatcgactgccctagaaagtgttcagctagaccgcaaatctcggaatctgccgacatcttggaggcattcaggggatggcgccgagtaacaagaaggctttggagctggttgcttgacttgaccgaccctgtatcatgtaatttgtatgccactcatttgtggtgcttggattgctgctatcttagaaaaagaagtggtaaactggttatgtatggttgtcttgtaacgaacaaaacaaatcaaagagttaggtgccgtttgttttacaaaaaaaaaaaaaaaacgcgaacggggacccgcccctcccaacgttaaaccatgtttgtttaagtct

SEQ ID NO: 5208 - DNA, 1940 bp, Zea mays
gccggccgggtcgggattcattcgcactactctgctcgctccgcgctctcaggctgggctgtacctgtacgtatataggtcgtcggcgacccgggcccggccgggactccacccacgcctccaccacagagagcagcagcagactcgcaagggggtagggttgtgtactctgcgcctgtgcggacggcggccggcggacggcgaaggagatggatcgcctgcccgagtcgacccggagcatgaggaagtacgcgtcggaggccggcggcctgcgcgcggcgcggcagggcccccacgggcggtcgctgacggcgcgcacggcgcacagcatgtccacgacggcgctgcgcaccaagtccaagtcggccgcgtcgctgctgcgcagggtgcccttcgcgccgctccgccccgtcctcgccaacctgcaggaggtgttcctcggcaccaagctcgccgtgctattccccgccgtgccgctcgccatcgccgcccagtgcgcgcacttcggccaggtgtgggtgtttacgctcagcctactcggcctcatccccctcgccgagcgtgtcagcttcctcaccgagcagatcgcgatatacaccggccccaccgtgggcggcctcctcaacgcgacgtgcggcaacgccacggagctcatcatcgcgctcttcgcgctcatggggggccagatcgaggtcgtcaagtgctccctcctcggctccgtcctctccaacctgctgctcgtgctcggcacgtccctcttctgcggcggcgtcgtcaacctcggctccgaccagccgtacgacaggacccaagcggacgtcagcacgggcctcctcatcctcggcgtgctgtgccagtcgctgccgctcatgctgcgctacgcggtgggcgccggcgagcactccgtcgccgcggccaccacggtgctcgacctctcccgcgcctgcagcgtcgtcatgctgctcgcctacgtcgcctacctcttcttccagctcaagacgcacgcgcagctgttcgagccgcaggaggtggacgacggctgcgaggcggaagaggacgagcaggccgtcatcggcttcgccagcggcttcttctggcttgccttcaacaccgtgctcatcgccatcctgtccgagtacgtggtcggcaccatcgagcctacctccaaatcctggggtttgtccgtcagcttcatcagcatcatacttctacccatcgtggggaacgccgcggagcacgccggagcaatcatttttgctctcaagaacaagctggacattaccctcggagtagcgttggggtcggcgacccagatctccatgtttgtggtgccgctgagtgtcattgtagcttggatcgcgggtattcaaatggatcttgacttcaagctcatagagaccggctctctcttcgtctcagtaatagtgacagcattcaccctccaggatggttcgtcacactacctcaaggggatccttctgctgctgtgctacattgtgatcggtgcatgcttctttgttacgaggcaacctgcaagtaacaacaatggcgctgggctgtcgctgccaactggcactttgagtgcacaagctgcatgatggttcaagggtcctgcctgagcctgaacaaatgagcatccaaggcagcaacgcagttgtgagtcagaaacaatgccgtgcaaaggttgatgctttcagaagcggtgaaatctcagccggtggctcagtgctatgggagaaatgaaggctagctgctgttgcaataagggtagcgaatatgcatccggtctatgtatatgatgctgtgttgtttcatttattatacagcttaataagatatatgcagagggtggatttgtataaaaaaaaaaaaaaaagggttgtgcgcgtgtacaaggcgattccaaaaaaaaaaactcgagaccggccctctcctcgtgc

SEQ ID NO: 5209 - DNA, 2777 bp, Zea mays
gtgggactgggcttttcaaatcaacagatgaagaatccccactgatatccatggacgacgaaggatggatcacaattccgtgcaaggcacttcctgaaagttggaacgacatatcagaaatggttcagttgcaggctctggaccgttccttcctttttccagttatcaggcgagcaggttcctatactggcgtgcctgtcagcttctaagcaagatgtacaggttatatccccctttagaattgccgcagtaatgtctaagaatggaacttctatgcaaaactttacaaataaatctagccctgtcagtgcaaatggtcatgataatggagcagctggagaaagtggctatgaggatgttgaacccaatggtgaagcatctccttcaggacatgatattttggagactcaatctctccttcagatggaggatcataagcagcagatcgaacatgtgttgcgaagatttagaggatcaaatttttttgtccggattgcggaatcagtggaacctctatggtccaagaaaagtgtaacttcaactacgatggcagatgaacgatcagataaccagggaaatagtaagagctcaaggagtaatgtttataataccatttctgataaaggggtttttgatggtaacacatctgggggagttgctcgagatgttgtcaagtgttattctctgcaaaatggagacatagtggttgttttgcaagtgaatgttagcgttaacaaattggaagatcctgtgcttgaagtccttcagtttgagaaaagtatatcaaacaattgtatgcctgggaatcttgtggatggacattgtgacagtaacgatgatccatgtcaggagctgcttagttggttgctccctttagatcgcacattaccacctcgttctttggcaccccctactctcaatccaagtgtatcacacaagcaatcttattctgcttctggttctcaaatattcaacttcagaagttactccatgccttcagcctcttctgttcagacaccaaataatataagaccacccccgaggccggccgggcaagaatttatgcctgaaaaacctgcaaaaaccccagatattataaatgatgggcaactttcgtttagaggagttcctttagaacctgaacggtattctgtacgttgtggtttagaaggtgtgtatctaccagggaaaagatggcggagaaaagttgaaatcattcaaccaattgaggttcattcttttgctgcaaaatgtactgtggaaaatcttctctgtgtcacagtaaagaatattgctcctactcatgcaaaagatatagtcgtattcatcgatgcaattactattgtatttgaggaggcatccaaaggaggtgctcctttgtctttaccaattgctagtattgaggttgggcatggtcacagcttgccaaacctagcactcaggaggggcgaggaacactcttttattctcaaaccagcaactatgtcctcaagggaacggaagaccaacagtcatgcacctctggccttatcactcccaacgatgaccggtgctactttaaatactcatacaccaaaggctggtgagccgtatgctgatctaagcgaccaatatgctgtactggtatcttatcgctgtaattacacagaatcgaaactttttttcaagcaagcaacaagctggcgaccctctgcagccagcgatcttatgatctcagtatcatccgaactgtctttacggaatcctagtcttggtgctcgtgttcctcaactccccgtgcagatactaacactcgaagctactaatatgacatccgaaaaccttacattaactgtccttgctcctgaagcatctggttcttcttcagttgtatccttgaactcatctccaaccaccccaaatggttcttttgatggtgttaatgagtcatcaaaaagatctgggctgggaaaagatggaattggctttcgaagattgaattctgtcctagctactccaaaagaaggtgataatggaggaaacagaatgagtaatgcttcaggctgtactcatctgtggttgcaaagtgcagtgcccctagggtgtgttcctgcccgctcaagcaccactgtcaaacttgagctgctaccattatcagatggaattatcacacttgatactctgcaaataaccgcaagggaaaaaggccttgcttacattccggagcactccttggagatacatgccacctctggtatgtcatcaggaaggtcataggataggagagcatcaagaggtatactgttctgtatattgggggcctgggactcagcctgtacaaatgagttggaaacaaccaggccaagcatgtttttttttatctcatttgtattggatggacataaggcgctcaccttggagagaaactacccccagattttaccgaaggatggttgctgccaacatggggaaactaccccagatgaatcattatgtatcacaattgtgttacaaatccattcatttcatactgaggtcgccgagacactggtgttcgtcttcacaaaggcttatgaaattcgtaacgtgttgcttagttttgatgccgttattgttgttggtggtgttcatttaatcccactcatgttgctgagttgtaccatatgcgggctctgatcataatatactggagaaatagaaacatgtgtgtccattggccattgctcatcttcatgatgatatatcagttgctcatgaatcattaaaaaaaaaaaaaaaactcgagccggggggcccgg

SEQ ID NO: 5210 - DNA, 2462 bp, Zea mays
gcacgagaccattacctagaacatcctaatcgaaaagcaaaaaggagagggagagaccgaatacaggctacagccgcttctgttctgtgaggggaaaaaagagaaagagagggagagagagagagagggggctggccggctgggggagtgccaggccagctgtggggtgtgtgtgtgcctgtgtgggggaactgctggggatggagagcgagatggcggacgcgcccgccgcggcgatcccccccgccgccgaaccgctcgcggcggtggcggaggaaggggaaggtgaagcggaagcggaggcgcccgccgaggcggcggtggggtccaccctcaccatggagcgcgtcgccgccgcgaagaagttcatcgagaaccactaccgttcgcagatgaagaccatccaggagcgcaaggagaggcgctttaaattggagagacagctagcttcttctcaagttcccaaggagcagcaaatcgatttaataaaagatcttgagaggaaggaaactgaatacatgcgacttaaaaggcacaaaatttgtgtggatgactttgagctgctcactattattgggagaggagcttttggagaggttcgattgtgtcgagagaagacctccggcaacatttatgcaatgaaaaaactcaagaagtctgatatggttgtcaggggccaagtggaacatgttagagccgaaagaaacttgttggcggaagttgctagtcactgcattgtgaagctttactattctttccaagacaccgagtatctttacctaattatggagtacctccctggtggtgatatcatgacccttctcatgagagaggataccttgactgaacatgtagcgcgattctacattgctgagacaattcttgctatccaatccatccataaacataactacatccacagagatattaagcctgataatttgcttctagataaaaatggtcacatgaagctgtcagattttgggctgtgcaagccaattgactgctcaaagctctcaacgttgaatgaagatgaacccatgggtgatgacaacatgagggaatcaatggatattgatagttctttgtccaatacagcaaatggtagaagatggagaagtcaacacgaacagcttcagcactggcagatgaacagaagaaaactggcattctcaactgtcgggacaccggattatattgctccagaggttctgctgaagaagggatatggaatggaatgtgattggtggtctctaggcgcgatcatgtatgagatgctagttgggtatccaccattttatgccgatgatccaataactacatgccgaaagattgtgcactggagaaaccatttgaagtttcctgaggatgcaaagttgtcaaatgaagcaagagatctcatttgccggttattatgtgatgttgaccacaggattggcagtgcaggggcagatcaaataaaggcacatccttggttccaaggagtcgcatgggacaaactttatgaaatggaagcagcatttaagcctcaagtaaatgatgaactggatacacagaatttcatgaaatttgaggaactggaaaatcctccagccaaaacaggctctgggccttcaagaaagatgatgctgaactccaaagatctgagctttgtggggtatacatacaaaaactttgatgcagtgaaagcaataaaaatttcagatctgcaaaggaattcatctctaacaaggccttccattggttcgatattcggtccatcaggcatggattctcccatggaaccaaacggaagggacacacacatgcacacagtttcatctggtgacccaatgattccctaaccttcagtgccgtctgtcctcagcaaatttccgaactaaatcagcgtgcaaacgccagggtgatgtggctccagctggacaacatgcttatttttagccaggtctctgctctctttatcgtgggcaagcggtttgtagaaatccaccaaagtttctagttgtaaaatagtatgccacagacttcaacaaaggtcccatgcattattggctcatcagacatgggggcagtttttttttggagaaattgcaccttgcggctggctgcccaggttggcagagcaaattgcggccttctcttgtggcagttcccggtctgcaggaaagggaaatacgacggtgttgttgcagcaggaattctcatggttagtgtcgttgttggtgtttgatatgtatcaggaattttcacatttgaagtagggtttctgttagcagagttgtagctattgacaagcaacatccttttacggagttgctttttttcgttgatgtatggaaaacgagacattgtagaaatcgaagttcgatctagccttgtatgctgcatatctgattcaaagtgtttctcagtatttttgtctaaaaattgcttaaatcaatgtgaaaatagaatttttgtgt

SEQ ID NO: 5211 - DNA, 1768 bp, Zea mays
aatggcaatctatctcgatttgcagtgaatatttttgccctccgggccagggtttggcagtagaaaagatgacctgaacaatgtatcaccacacatatgtaccaaaatatacctagaggcagcggcagcacacacaagtgtcaccgttgaggtatcaagctgaacatccatccatccttcaaaacaccggacagaacaagaaaaaaaatcgctacataaatggtggaaagaattgctattagcagctcaatgtgaaatcctcagctctaatgcaccacgccgcatatgatgttgtgcaggactacattcagatgaggagggaagcacatagcatcagcaatgcgatgaggatcgagacatcggttcgcattctgagggcggcatgcgaaggagatgcagccgtggtggtgttactgactggaggtagggctggttctgcaacgtcagcgtccgtcaagagcggcattggcgccgctgctggtggctgtgcatctggggccatggttaaaaggaggctacctggttgcggaggctgcataaatagtggtgcgctgtttcccatgctcgtgcaggagttcaatttgtatctgtgagcagtcccagggaaatcagtgatgatcccgtccaccttagcaccttgcacataagcattaatctgtgaagtggcgtctgcgaagaagtcattcggctgagatgcaaactcattcatgagcacatagacgtaaacttggaggcccgcagactgaagggacgtgacaagcttattggtctggtttgtcaaataataatgggtctgtggtaaaacagatgtggtgctaacagagacggcattagcaaacttcttaatgtctgcaagggatgaaggtgcggcatctctgacaccttcttcaatcatgtagacaaggctgtacttggtttcctgcttgaacttctttagcaccgagctgttggttgactgaatcataacattctgggcagtctgtttgctataaccagagtcatcaagtgctttgaccactgcgtctaccactccaaatccaagcttctctgccatgaatgcagcatgctcaacagttatcatgattcctgacaaatcctttccctttgcaaacgtcaaaaagtctgataatctcatgaaatttcctgcattcttgtttctgggatttctgtacagtttataggtgctcattgggttcgatatcatgggctgtaggttcttagaaatatcatcccaagtaaggttgaaggtgaagactccaggaccagccttcagatcgttgatggtagttacttgcgaagtaaatgatgattttccaacagtagtgacatccattaggtcaacagaactcatgcatatcagtatgccatctttggtcacttgaacaggacagtcaatgacatctgcaccatcagcaactgccttttcataagcttggtcggtgcagtctgggtagtcaccgctagcaccattatgagagataaccagaggtttagcatggtcgatcttgctgttgttcaggttactaaagcaaccaactgcctctgaaggagtaatcgggaaatcagtcaacacaccatcgacagagaaggcactgttccccggccggcctcgagggtcccctaatggatcaaagctgtagttatagctgatagtaaagtcatttgcaaaatcagcagcatagatttctagccccgctttgtgagcatcatcaacaactgaagtataaggcagtaggtaattatctggtgtaacccggccggcctcgag

SEQ ID NO: 5212 - DNA, 2142 bp, Zea mays
ccggccgggagatttgggttccggactgctttatctataacaactcgttgtggcgcctaaattattgtgttggtggtgaggtcactacaatgtatcatttggatcgccctatgtacctattgggatatcttgcgaaccaaagtcgagtttatcttattgacaaggagtttaatatcattgggtacacattacttctgagtttgattgagtacaagacccttgtgatgcgtggggatttggaacatgcaaatgaaattttatcatccataccaaaggcacaatacaatagtgttgctcattttttggaatctagaggtatgttggaagaggctcttgagatagccacggatgctgactacaagtttgacctagctgtgcagcttggaaaattagatgttgcaaaggctatcgtcatagaagcacagagtgaatctaaatggaagcagttgggtgaactcgccatgtccacaggcaagctagagatggcggaggaatgccttcttcaagcgaaggatttaagtggcttgttgctattgtactcatctcttggagatgctgaaggaattgaaaagcttgcttctttggcaaaagaacatggaaaaaacaatgttgctttcctctgccttttcatgcttggtaaagtggaagattgcatacagttgcttgtagacagtagccgtatacctgaagctgcactaatggcgcgatcgtatcttcctagcaaagtaccagaaatagtagcaatttggagaaacgacctcagtaaaattaatccaaaagctgcagagtctctggcagatccttctgaatatccaaatttatttgaagactggcaggttgctctaactgtagaaaaaagcgttgcttctcagagggatcattatcctcctgctgaccaatacttgaatcatgctgagaagtcaggcatgattcttgtggaagctttcaaaaggatgcaggtcattgagcatgaggaacctgaagatgcagctgaggaaaatggagaacctgatcaacaggcatcggaagagaaggaaatgcataacacagatgatgctgatgaacatgaagagacagtttcagtaaatgggaacgagggtgaggaacagcaggtgctaactgaacatgaataggggccgagggaagcacaacgcattggctgcaaatgttattttttcccgagggtaacaaatgtggcccccagttttaccctgaagcaccggaaactggtgatgcttgtggccattggaggccacctgatgcttgtccgatctttctgagtgaaccccaagcttgacatattgatgcttgctacacttttggtgtcgatatgcttcttctgccaacaacataggcaattctttcttctcggatcatctgcggacccgatttctatgcgctcgaaccaatgaactgggtggggactgtggagccattttgtgatgaatagttcgaataatcagtatagaggtacgttgtaaaatatgccagattaccatagccatcgaattctcctaggagatgacagtttttgttagccattcattgtaatgatgttacttgataaggaaggttacgtgtagtatatgattgcggttgcgggccgagggttttgcccatgttatacttatatatagtggtatcaatccatcggatcggaggctctcgtctactgatgcctaatcaatgccgatgactgcgagaattcaatgcctagatatgcagtgtaacagtgtctcgctgcacacctattcatcgtttcaaaccatggtccatggaatttattttgatgctggaatgctgcggcatgtccaactgacatatgtgtgctgtgccctcgcttggccgcggcgcctttttatgtgtttggatcacattcacgcgtacggagcacgtcgacgagtgaaccaacacaaagacaagagaaattaatttgtctcgtctattataattcttatattatcattaattgggtatatagataactaggctcccttcacttttggagttgttggcctcctcgtgaaaaattattacttgtccaggcgcgagatcgccatggacgccgcctacgggaaaggcagatggggcctggggagcgagagcgggggtcactggacgcaaccgcaccaagggtaccga

SEQ ID NO: 5213 - DNA, 1762 bp, Zea mays
agatctactagtgtcgaccgcgacggaaacttcccttccgtctcacggcaagtatcttccctcttcccctctgctcctgccaggctgccacacctccgccagcgctagggttttcattttcactcgctgttgctggtggttgttacccttcctctctctctcagccgtcaccctcggagccgcagtcgccgtagcagatcttctctctaatcctatcggtcaacagctgcttgctcgggacgggaaccggaggtggggttgcgatggcgctgcagtacgtggaggcgcagcggcagttgcgcccggacctctccgactggtacgcctccctcgccgacctctaccagcggaagctatggcaccagctcaccctcaagctcgaccaattcttacagctccaggtcgcacagaccggagacactatcattcagctctacaacaatttcattgtcgactttgagaccaagattaatctgctcaaacttgcccattttgcggtgataacttctcgccagtaccctgataaggatgctgcaattactttcttagagggggtgatcacaaagctgcgtgagacaagggagtcacggatcaatgaaccaattctctatgtgaagatgcaaattgcagctattaatcttgagaaaggaaacaaaaaagagtgcaagaatttgttggaagatgggaaaaccactctggatagtatgactgatgtcgatcccacagttcatgctagcttttactggatatcatctcaataccacaaggcctgccaagaatttgcagagttctataagaatgctcttctctatctggcctacacaactgtggagtctctatctgagtcattcaagctagacttggcttttgatctatctctagcagccttgctgggtgataacatttacaactttggggagttgttagctcacccgattatcaatagtcttattggaactaaggtggagtgggtttatcatatgttacaagcattcaacagcggcaaccttgccctctaccaagaactttgcagggttcacaatgctgctcttactgcacaaccagctttggtgcagaatgagcggaagctgcttgagaaaatcaatattctttgtctgatggagataatctttagtcggccatctgaagatagaactattccattaagtgttattgctgagcggactaagctttcaatcagtgacgtggaatgtcttcttatgaagagcctctcggttcatcttattgagggaataattgatgaagtggacagtacagttcacgtatcatgggtccagcctagagtgcttggaattccacaggttaaggctttgcgcgaccgcctggatgcctgggttggaaaggtgcataccacattgctttcagttgaggcggaaacacctgatcttgttgctgtgtaatttcacagctgttacacttccgcgagaggcttggtcagcaaggtcccatttgcaaaatgtgagatgctttgtgtgacacgtagtcattttctggataatgagatctgctgctgccctgagcgtttgtcttcctgcgcctactgatcaggacatgtaatttcttttttggtgccctcaggacatggatggttagaactgcacgcagtgtcacggagacgggaccaatggattgaaaatttcatactagtagggtgttactagtagaacacgatgcaggagaatcttgctggaaaaaaaaaaaaaaaagatgtttgcatggcgccctgcgataagacgtggat

SEQ ID NO: 5214 - DNA, 1746 bp, Zea mays
gatctggtcctcatgaagaatgggtgccattgcgacaaccccgcgtccggccgcctcagatacgtcttgcgcaccctgctaccctctcaaaattcaaaactaggaaacgactcagggaaacagcaggaagttgtttatgggttatcggagatcatgtagacgcttgggtcaacaatagctgttggcgagagggagttatttctcagaattatgagactgatgagacgaaatatgatgtacatttttcagttggaggtggtggtgagtccttagtagttgatgcttggagccttcgtccatcgcgtgtttggaaagatggtcaatgggtagagtggtcccgtgcaagagaaaggaaatccaaatctaataagggcgattcacctcctgagaaacgccaaagaatcgacttgcttcaaactggtggcaatctatctgttcttggcgaagtggggggttcttcgaaggacaataatataaacaatgcaaaaaacccggaggaattaaagccattgtctttgtctcagggggaaattgttttcaacattgggaaaagtgtagttgagaataaatctgattctcttgcattcagacgtcctggactacaaaaagaaggatcaaaggtcgtctatggtgttccaaaacatggaaagaagaagaagtttatggaagtaagcaaacattatgatgcaggccaatctgacaagatttctgagggcaattcatctaacagattcgtgaaacatctgatgccacaattgccaaggccacgtgaaaatgcttccaaagttgaccctattagaggaaggagagtaggtgaaacaaggtctagattacctaaacctacgaagtcccacaatgttggagctagcagtgttcctggaaaggattccttgcctatgcaaatgcatgttccaaattctggtgtttctgaaaggagttctagttttgcaggaagttcgacaagcacttccaacaatgagaagcccacttcagaaaataataatccggtgcttggtgtgggccttagaactgaagtttcttctggtcctgaactgcaaactgcatctactgttcctagttccaagccaaatgtatccactactaatcgagctaaaaggaaatatgttcccactgtcagtaacacaaacagaggtatactaaaaacctctgaaaagtcgagttctgattctgctgagccccgaaggactacttctgattctgctgaacctagacgatctaacaggcgaattcaaccaacttcaaggttactagagggcttgcaaagttccctcgtaatctcgaaagttcctggcgagaaggttcataggagcaattacaaaagtgcatcctcaagagggagaactcaagctcatgggtgagtgaaggcaccacatagctcatagctgcttttggtgggacagctctcgtgtacatagctgtagccgtccagtatggaaggaggatagggttggagtaggaagtctttattggagcgcaaggattcagatgtattataaactagcttaagtgcattgtgttaaccttttcttttacttgctcgaattatacttttccgtgttgtagaatacctggaaatatccttttagtatgtgtggatacaccgggaaagaaattgggtgccgtttaaattcatccgataatttaacgtgagtctgaacgtcaatttgactcgctactaaaatttgaaaaaaaaaaaaaaaaaaaaaaaaaaaaactcgagggggg

SEQ ID NO: 5215 - DNA, 2727 bp, Zea mays
cccacgcgtccgaaccgtgagtgatgatgatgttgtacttgaaactacagcaccaaggctgtacagcatcaatgatggccaattgaagctggaagaaacagctcttacaaaagccgtgcttgaaaataccagatgtttcttacttgactgtggggctgaaatatatgtatgggttggccgggtaacacaaatggaggatagaaaatctgccactaaagcagttgaggaatttcttattaatcaaaagcgtccaaagacaacgagggtaactcaagtgattcaaggttatgagagtcatgctttcaagtccaagtttgaatcatggccagtgggtaatgctactgggagccctggcgcagaggaagggcggggaaaagttgcagctttattgaagcaacaaggtgttgatctcaaaggagctgcaaaaagcaccaccccagtaaatgaggaagttcctcctttgcttgaaggcggtggaaagcttgaggtatggtgtgttgatggcaacgctaagactgctctgccaaaagaggatattggaaagttttacagtggagactgttatatcattctctatacgtatcattcgggcgacaagaaagaagaatactatctcagctactggattgggaaggatagcttggtggacgatcaagtgtcggcatctcaaataactaatacagtgtggaattcattgaaaggacggccagttctgggtcgtatataccaagggaaggagccaccacagtttgttgcacttttccagcccatgattatcttgaagggtggaattggatctggatacaagaagctcatagaagaaaagggtgcgacgggtgagacttatactactgaaggcatagctctaattcgagtatctgggacatctatccacaacaacaagactcttcaagtcgatacggtggcaacatctttaagctcaatggagtgtttcatactgcaatctggaaatgctatgtttacatggtttggcaattctagcacatatgagcaacagcagtgggcagcaaaagttgctgaatttttgaagcctggcgttgcagtgaagcactgcaaggaggggacagagagttcaggtttctggtttgctcttggaggaaaacagagttatacaaataaaaatgctcctcaggatattattactagagagcctcacttgtatgcattctcattcaagaacgggagactggaggtaactgagatcttcaacttttcccaagatgatttgttaactgaagacatgatgatacttgacacacatggtgaggttttcatttggattggtcagtgcgtggaatcaaaagagaaacagaaggcatttgatattggccagaaatacgtggagcatgcaaattctattgatgatctttctccatatgcaccactatataaagttatggaagggaatgagccatgcttcttcaagacatatttctcttgggataacacaaaatctttggttcatggaaattccttccagaagaaactctcactgctttttggattgcgttctgagggtgcatctaggagctctggtaatggtggaccaactcaaagggcatctgcattagcagctctatcatctgcattcaatccatcgtctcaacaaaggctctctaatgagaggcctaaaagcacaggcgatggacccactcaacgcgcctcagcactggctgccctatctaatgcattcaattcatccttaaaacccaaaacaccacctccatctcgctcaggtcaaggttcccaaagagcagctgccgtagctgcactatcctctgtgctgactgctgagcaatctggatcttcagaaaatctacgagccaaagctagcagcacaggagataagactgatgtcgataggcctgtcataactccagctggaccatctggtccatcttctcctcagtctgaagctggggagtccaatgtgtttcgccaggaaaaagatgctgcagtagatggggcaccatctgacactgatggagcagtggctgagacccgagaggaagaaacgacagagaatgttggtgaagcgacatttagctatgaccgcttgatatctaaatctaccgatccagtccgtgggatagattacaaacgcagagaggcatacttatctgatagtgagttccaaagtgtttttggcatgaccaaggatgcattctaccgacagccaaattggaagcaagaactacagaagcgaaaagcagatctcttctaaagagaacacgccttgtctcaagcgcctgctagaaaatgcgaccctctcgtcgtgaatggtcggtcccatgagagtaagtctcaatatattgctggttatttctgaggacgggctactggtggctttgctcggttgttttttttttgcaaccaattttataggccgattcttttatttgtacatggcctgggttgtgctgcttgcgaggtcctaaaatgctcatagctttgtgttgtgactgtccatatgtgtatatcgttttttttcatcagtttgttacgtatgggcatatcctggtaggttgtcaattgtattgtcattcagatgtattgcacacgaaatacttgtgctgtctgtttgttgttgatggttggcagttgttttgtttgggatttgaaacacttgattggatttctcaaaaaaaaaaaaaaaaaaaaaaaaaacgccaaaaaaaaaaaaactcgaggaagggccgcggtacc

SEQ ID NO: 5216 - DNA, 1729 bp, Zea mays
aattcggcacgccccccccccccccccccggtccacaccgtccccgtcctcccactcccccctcgcaaccatttcaaatcgctctctcgacccaactgtactcgccgtcgtcaattcatcatccatccccatccccccatcgactcccagatctctatccccctctccctgtcctcactctctcgagcgcgttgtggcggatgtcctcgtcggcgcgtttcgatctccgggcctcgtcgcatcagttgcagccgccgccgtcgcacgccagcatgagcagcgacgggggcgcgttcgcaaacgcggagaacctggagcactgcgcccggtacctgaaccagacgctcgtcaccttcggattcccggcatctctcgacctcttcgccaccgatccggtctcgattgcaagaacttgtaactgcatctatgcgctgctgcagcagcgacagagggacattgagttcagggagtctacaaatgaccagcggcagcggatgcaatctgatatctcacggctggaagctaagatagagagaatggatgctcaattagcagcgaaagatcgagagctagccactcttactcgaacggaggccaaaaacactgctgctctgaagtctcagattgataagctgcaacaagaacgtgatgaatttcagaaaatggttataggaaatcagcaagtacgcacccagcaaattcatgaaatgaagaagaaagagaaagaatacataaagttgcaggaaaagctaaatcaggtattgatggagaagaaaaaggaatcatcccgttctggaatggagataatgaacttgttgcagaaagaaggacgacaacgcggaacatggaatggaaaaaagaacgacaatgattattacaaaatgattgttgatgcatatgaagtaaagaaacaagagctgatgcaagagaatgcagatttacgggcactgttacgttcaatgcagatggacatgcgtgactttctcaatgccccgaatgggtcatcacaatctactgttactgataatggaagacaggagtcagggtctcctcagtctccgcttggtggcaagacggatgtttttgacttgccctttcatatggccagagatcagatagaagagagtttgcgcacaaaaatgacttcaatcaaggcacgaatgacacaacttcaagatgctcagaaaggtgcagaagtgacttctgaggcaactgaccgggagcttgagcttgaagctcaactggttgaagcaagaagcatcatccaagagcaggcctgcatcatgtccaagcacttcaagtctgataagccaagtggcaggaggcatagcggtctggatggcgagcgtgaggcatctgccgaggtgtaaaagcatgtctgtagcaaggatatatctgttctgcaggacctcctgattttagtaagtaccgaggtagtatgttgcaggatataacatggtcctgtgctgttgtagcccgagtttaggtgctgtctatgcagtatgatgtgcaggagcatatcctccagcacatggctaacccgatcacatctaagtcacatgtagcgtaactgtaatcatattcatactatatgaagaatgtcagtgtagcaacccttgaaaaaaatggacctttcggaccttacatctagaaaaaaaaaaaacaagataaaaaaaaaaaaaaaagcggcccagcggtgacagcacgttgtgacccttgttccctgctg

SEQ ID NO: 5217 - DNA, 1450 bp, Zea mays
atgttttgtgttcgttccacgtgtctgtgcacaggcctagctctggaaccgctctcgggagccctggcggccggcaacgccgtggtggtgaagccgtcggagctcgcgccggccacctcggcgttcctcgcggccaacatacccaagtacctggactccaaggccgtgaaggtggtggagggcgggccggaggtgggggagaagctcatggagcaccgatgggacaaggttctcttcactggtaatgaactacgtacgtaatgcatgagcgtgtatctgcgttaccacctggtgtctctctatagggcgattgggttctctcgaggccggccgaggcagccgcgttgggcgccttatcatggcccaggccgccaagcacctcaccccggtggcgctggagctcggctccaagtgcccctgcatcgtcgactggcttgacagcgacagggacagccaggtagctgtgaatcgcatcatcggagcgaaatggtccacctgttccggccaagcctgcatcgccatcgactacctgctggtggaggaggagtttgctccgattctgatcgagatgctcaagtcgacgctggagaggttcttcaccaagccagagtacatggcgcgcatcctgaacgagaagcagttccagaggctgagcggcttcctggccgaccgcagggtggcgtcttccgtggtccacggcggccacttcaaccccaagacgctgagcatggagcccacgcttctgctcaaccctccgctcgactccgacatcatgacggaggagatattcggcccgctgctcccgatcatcacggtgaagaagatcgaagacagcatcaagttcctcaggtccaagcccaagccgctggcgatctacgccttcaccaggaacgagaagctgaagcaacgcatcatagacgagacgtcgtcggggagcatcacgttcaacgacgccatcgtgcagtatggcctggacagcatcccgttcggtggcgtggggcacagcgggttcggccagtaccacggcaagtactcgtttgacatgttcagccacaagaaggcggtgctcaagaggagcttcctcgtcgagttcatgttccgctacccgccgtgggacgagaccaagatcggaatgctcaggcgcgtctaccgcttcgaatacgtctcgctcttcctcgcgctcatcggcctcaggagatgaagcagacggcggagagtgcgtgaacaatcgagccaacagaatttgcacccacacccaacacacagttgctagtggtcaattgtcgttcatactgatcgatgaatatgtaattgtcccttctgtacaccaaaacgtctgtagtgtcgtttactcgttttatacgtgtctgtctatttatcgcaccaaaagatatttaataataatggattattatctttctagtaaaaaaaaaaaaattaaaaaaaaaaa

SEQ ID NO: 5218 - DNA, 1477 bp, Zea mays
gcacgagaccattacctagaacatcctaatcgaaaagacgcaccgcacaccctagcataggaggcaaagaagtacagagggaggaggcgggcagcagatacgcggcgtgacagacacccagggccaggaagggtgctgtttatccatgctgctccggctgaagatcgtcgtcggcgtccactcggtggtgctcccggttcctgttccaggcggctatggccatggcgcctgctacgcggcagtagagccctgctggcgccgcagccggaggccagcgctagcggcggcgggtggcctcgtcgcgaggcggccgaggcagagcgccacggtggtgatggcgctgaaggaggagccggagggcagcagccgccgcggcttcgccggcggcggtccgagctgggaccccgggctggagatccaagtccccttcgagcaaagaccggtgaacgagtactctgctctcaaggatagcgccctctactcgtgggcggagctgagcccagggtccttcttcctccgcctcggcggcctgtgcctcgtgaccttcactgtgctcgcggctccaattgccgccgcaagcttcaatccaggaaaggatccactcaagttcgtgctagcagctgggatcgggacgctgcttctggtgtcactggcggttctcagaatatacctggggtggagctacgttggtgatcgcctgctgtcagcggtggtaccgtacgaagaaaccggatggtacgacggccagatgtgggtgaagccaccagaggtgttggcccgtgacaggctcctgggatcttacaaggtgaagccggtggtcaacctgctgaagcagacgctggtgggcaccggcgcgctgctcgtgggcgccgtgtcgctcttcgcgttcgccgcgccggtcgaggacttcctccacgccctgagccagcctccctcctccgccaccgcctcgtccaagccgagcttgaggaaggaggagctgctgcggctaccagtcgaggtgatgcaggacgacgacctcgctgcggccgcggccgaggccgccgacggccggcccgtctactgcagggaccgctactaccgggccctcgccggcggtcagtactgcaggtgggacgacctgctcaactgataaatacctagagcagtattgctgtggtacgacgcggcaggacaggacgtattttttttgtcagatgggaaatttcggactgaactgctagaaattgagttcttaatggcacacaagcataaggaacagcaagaaaaagcaacacagaatcagagaaaaaacaagagtttatatattcacttttctctctttgtttctggagttacatctggtctttccgtttcttgagttacctctgatctttttgtttcttgagttaaaaaaaaaaaaaaaaaccttttatttacagcaaaggatgcaagggttaatacacattacagtgtgtacttttcagtttctcccctc

SEQ ID NO: 5219 - DNA, 2021 bp, Zea mays
cgcaattaaccctcactaaagggaacaaaagctggagctccaccgcggtggcggccgctctagaactagtggatcccccgggctgcaggaattcgcgcgtccccggtcccctggacggccaccgccacgcagcactgtccgtccgcttctctctccccatctccatctgcaatcctcgctcgcccacgctcggcagccatggcgtcgtcgcgcaccggagccggagccggagccggagcggcggccgtgtggtggtcttcccgttcccgttccagggccacttcaacccggtgatgcggctggcccgcgcgctgcacgcccggggcctcgcgattaccgtcttccacagcggcgccctggacccggccgactaccccgccgactaccgcttcgtgcccgtgaccgtggaggcggacccgaagctgctggcgtccgaggacatcgccgccatcgtcaccacgctgaacgccagctgcgacgcccccttcagggcccgcctctcggcgctgctggccgccgaggggagggacagcgtccggtgcgtcttcaccgacgtcagctggaacgccgtgctgacggcgtccagcgacctcggcgtgcccgcgctcggcatgatgacggccagcgccgcctcgttacgcgactacatggcgtaccgcaccttgatcgacaagggctacctgccggtgaaagaggagcgcaaggaggatctccgtactccgagctacccctcgtacgtcggcgaggttattagcagagggagactagattagatttgcttatcatcacatacctgcagaggagcgcaaggaggatcccgtacccgagctacccccgtacctcgtcaaagacctgctccgggtcgacacgtccgacctggaggagttcgccgaactgctggcccgcaccgtcacagcggcgcggcgcgcctcggggctcatcttcaacaccttcccgctgatcgagacagacacgctggccgagatccacaaggccttgtcggtgccggtgttcgccgtcgccccgctcaacaagctggtgccgacggccacggccagcctgcacggggtggtgcaggcggaccggggctgcctgcagtggctggacacgcagcagccgggctccgtgctgtacgtcagcttcgggagcatggccgccatggacccgcacgagttcgtggagctcgcgtgggggctcgccgacagcaagcgccccttcgtgtgggtggtcaggcccaatctcatccgcggcttcgagtccggcgcgctgcccgacggggtggaggacgaggtgcgcggccgcggcatcgtcgtcacctgggcgccgcaggaggaggtgctcgcgcacccggccgtcggcggcttcctcacccacaacggctggaactccaccgtcgaggccatctcggagggcgtgcccatggtctgctgcccgcggcacggggaccagttcggcaacatgaggtacgtgtgcgacgtgtggaaggtgggcacggagctcgtgggggaacagctggagagaggccaggtcaaggccgccatcgacaggctctttggcaccaaggaaggggaggagatcaaggagaggatgaaggaattcaagatcgctgcggccaaaggcatcggcatcggcgtcgacgtcgacgaaactgcgtcgccccgcacggatttaaccgatttggttgatctcataaaatccttctgagctcatgacgatcgatctgttgggtgatgcctactctgtccatcgtgctcgacttgtcttcctactactgtaccactgtctgtgctcacttccacgttcctgacggtgttgtgttctagtgtatcattgtgcgatcagttccatgttcttggccatgttttagaataaaacagaaaacttgtgttcttggtgtaccactgtgctcactttcatgttcttgacggcgagttggaataaaacaagacttgtgtcatggtgtaccattgccatcattttcatgttaatataaagatttgacgctaaaaaaaaaaaaaaaa

SEQ ID NO: 5220 - DNA, 1322 bp, Zea mays
ggccgggccggggcacgagaccattacctagaacatcctaatcgaaaaacccgccgcagtccacgcgcccgcaccgcaccgcgcgccgcgctcgctgccgtgcccgtgtccccttcctttcccgtttccccctccctctctctttccccacgcccgacgcccccaccactctctcgatccaaagccagatcggcacgacgagcagagggccccccggagcggcgcggagcaatggcggcgggataccgggcggaggacgactacgactacctcttcaaggtggtactgatcggcgactccggcgtcggcaagtccaatctgctctcacgcttcacgcgcaacgagttcagccttgagtccaagtccaccatcggcgtcgagttcgccacccgctctctccaggtcgacggcaaggttgtcaaggcccagatttgggacactgctggccaggaacgatatcgtgctattactagtgcgtattatcgaggtgctgttggggcgttgcttgtatatgacgtcactcgtcactcaacctttgagaacgttgagcgttggctgaaggagttgagggaccacacagatcccaatatagttgttatgctggttggcaacaaatctgatctccgccatcttgtagcagttcaaactgatgaaggaaaagcattcgcagagagggagtcattgtatttcatggagacctctgcactcgagtcgactaacgttgaaaatgcattcgcagaggtcttaactcagatctaccgtattgtgagcaagagagcagttgaagctggcgaagatgcagcatctgggcctggcaagggcgagaagattaacataaaggatgatgtttcggcggtgaagaagggtggctgctgctctagctgacctgccctgctgtattttttttggagctgtggtgatgtagcttatggtacggcatttccagcgaccgagaactggtagtggcattagcagcttctatgttacctagagagtttattgtcaaactgggggaaaaaaactgaaggttagatcggtgtagatctttctggtactgtattgtgtatccggcaataggcatggtattgttttttttggctgtgaatccactggtaccatgtttaaacttatgaattgttcaaaatagaaaggtgcttcatgcttgccaaataaaaaaaaaaaaaaaaaaaaaagaaaacaagagaaaatgaaaaaagggcggccgcgattctgtggttaggatgtggaaaatggaggaagggttattgattgatacatcccgtgcacttggaggcaccatccgggcgattgcagctgactcg

SEQ ID NO: 5221 - DNA, 3845 bp, Zea mays
  misc_feature (6)..(6): n is a, c, g, or t
aatgangatatgcgatatagccggtggcggtggtgttgccatcccgctcgcggcgtgcagtcagtcagtcacagactccagcgagcgagggaccaaaaccctagctgaaccctcccggcccgcgcagcagctgcgtccatggaggtggacccctcgccgtcgtcgcgctcgcccaggccgccgcctccgccgctggcggcgatgccgagctacttcgacccggagtcgtccggccgtcgggaggagtaccgccgctacaggaagaggttgtcttcttcaaatgtctctcctctgctgggaagatcactctccaagacctctggaccaaggctgttatatgatggagaaagcatcccaagacagcctaatgccggtttactccttgaagacataaagcaggaagctgccgattattccaacgtagaaagcttggatggattgagactgttcggttcgccgaaaaggacatctctcgatggcggttctgcatcaggcgcagcttacagttcgggcaggcaagcagtgaggcagacgctgaagccagtcaaactggaggacgatatgtatgtgccgcatgaaggagaaacgccttctacaatgtttgcaactctccttgattctgggatccaaggtttgatgcacttccctgatgtaattcaacaatttgagaggacatgtcgaaatgcttcggagtcaatcagatctgctgcaactggaaagcttcgtgtggtggaagagaaacttatgcagcaaaatgctcaacttttactggacgaagctgcttcctggtcacttctttggcacatatatggcaaagaacatgaggagctttctggagagctgttggtgccgccaattacatctcatcaggaggcttgccgctttgttgcagcagacattacagcacaactgtgtctgcggatcatactttggcttgaaggtcttgcttctgaagctcttgatttggagaagaaggtgagaggcccgccggttggttcgtacctaccaagttctggtgtttggcaccgtacacagaggtacctaaaaaggaacaatgctgattctactatagtgaagcatgtggattttgatgctccaactcgtgaaggggcccaacttcttcctgatgacaagaagcaagatgaattgcttctagaagatatatggactcttttaagagcaggaagattagaagaggcatctgacttgtgccgttctgctggccaggcatggagagttgccactctttgtccttttggcggcataaatatgttcccttccctgaatgcattgcacaaaaatggaaagtacagaacactacaagccatggaattagaaagtggtgttgggcggcagtggcgtctttggaaatgggcatcatattgtgcttcagagaaaatcgctgagcaagatggaggccgttatgagatggctgtatatgctttacaatgcagtaacttaaagcgtgtcttgccaatctgtactgactgggagtcagcttgttgggcaatggcaagatcctggctagatgttcaagtggatctagaattatctcagtaccaaacaagtagaccagaaaagcaacttgatgacgacatgaatggagcccaaagttcagttggtccagaaagttggccataccatgttcttgatcagcaacctcatgatttaactgctcttctgcagaaactccactcaagtgaccttgttcatgaaactgtctctcgagcatgccgagagcagcatcgacaagttcagatgaatctgatgagtggaaatatatctcatcttcttgaccttctatggtcatggttatcacctgctgaagagaaccataataatactgcaaggccccttgatgaccctgagatgatacggttcggggcacatattgttcttgtgctgaggcaccttttcagtgatgggatggatgatgagttagatgaaaaactggttactgtcggtgatctcatcatcaacatgtacgtgaggtatttgttctcagaggatcaagaggagttggttggaatatatgcctcacagcttcaacatgacctttgcattactttgtttgtagaaatgatggaactaaggttaaatagcagtttgcatactatgtacaagctcttcctttctgctgtggagtatctgccattctcatctgataatgtatccaaggcttgttttgaagagatcatcgagagggtgctttcaagatctcggcaaacaaaacccactaagtatgatggggatttctctgatgttgcgcatcaacatcacctgcaatcacttcaaaaggctatggttattcagtggctttgcttcacaccaccatcctcgattccagactttcaaatgatcagtgggaagcttctgatacgggcattgacacatagcaatacactgttcagggagttttctctgatatcaatgaggagagtccctgagctaccagcagggccacacaagttgcttgccattttagctgaaccgttaaagcaaaaagaaaatttaatttcacgggaagatccggaggtatctgataacttgccggagtttgaagattggcatgaatattactcccttgacgcgacttaccgcagttggcttaaaattgagatgatgaatgccgctgtttctcctgagatgctttcggcagaggaaaagggtcaagctgttgctgcagctaaagaaacactgaacttggcatgttcgttactacgcagggatggaagaccatggctgtatgctgtcgagagcagtccatttgaatcccccgatgttattttccttgagctgcatgcttctgcaatgctctgcctaccttctggagaatgtatgttaccagatgcaacatcatgcacagctttgacaagtgcactatattcaactgtcagtgaagatgatgtgctgcatcgcctgttgaaggtggatgtccaggtctcttctagagacccctgctgtattgaagtcgctcttcgctgcttagcagcagaaggtgatggatatgggcttcatgaagccaacgatggaggtcttcttgctgcagtcatggctgctggctttaaaggtgaactcagtcggttccaacctggagtttcgatggcaatttcacggcttgatgcttggtattctgaccggagtggttccgtggagagcaccgctgcttacataattcgagggctgtgtcggaggtgctgccttcctgaaacaattctaagatctatgcaggcatgtatcgcactctccgcggctggtgatgatctagattactctctagataaatgtgacgaacttgttgagttagttggttcagccgagtctggaatgatgcatttgttcagccagcagcagttgcaggagttcctgattttcgagagggaatatctcatatgtacaatggagcttgaggaggaccggttgccttgtgatggctaagctttttccccacttgctgactaatccatgagacatgaccggcatgtgcattttgcggcgccgtgacccaagaacctgctgtgatgtatcgctacaccatttcaaagcggaaagatggaatttagtgcgtaacgtggttctgcccgtttgtgcacgagaattggcccgttttggaaagtcaatataagattattcaagtcgaaatccaagatttttgttcatgataaaaacaatgttcggcgcgaaaaaaaaaaaaaaaaaaaaaaaaaaaaaaaaaaaaaaaaaaaaaaagggcggtcggcggcctccggaaatttttgaccgggcactcgctaactaattacctcctggacccttaaaaaattccccctatagggtcttggaagtaaaccttgttgcttttttgg

SEQ ID NO: 5222 - DNA, 4100 bp, Zea mays
ctatatgagccccctgcagatgatattttcttgacaataagctgttgtcacgcaaaccattctccgttctgtttctcttgtttctggttgcttcgtgtaacatgtgaatccaccctactctctgacagtcatatgtgcccatgcataacgctagctgattcaatgaatgatgacaacacattattttcagatccttaaaaagcatgtatgtgtcctagtagttgcgtttacagaaaagaatgtcaaattgtgtatgtttcaatcgtttgagctacggggatgatcagagaattacatttccttcttaaatcatagccttttattttactgaaatatgtgttgtgtgttctaattggttcatacataattttctgcagaaagatccacttttggtgaaggtgaataagctgacatccacgaagacgcaacttccctactcatattactctcttcctttctgtaaaccaaacacgatagttgacagtgcagagaatcttggagaagttctgcgtggtgatcgcattgagaactctccttatgtggtcagtactagattactgcttgtcacatattcagcattgtaatttgtaatgtaccaaatcactgagtcgtcatgcactttgccgttttacgtttgtgttgtagtttgagatgggggaacccaagatgtgccagattatctgcaaagcaaaaattgatgataaacaggcaaaggagctcaaggaaaaaatagaggatgagtatcgggtgaacatgtacggattttatatgtggcactgtaattttgattgcatgaaaaatgctgcagttacataacgtattttcttcacaggattcttgacaatctcccactagttgttcctcttgcaaggcaggataggggtgctactgtttaccaggctggatatcatgttggtgtcaagggccaatacgctggtgtaagtttgtgtgctcagctggtgttttacttttaacagtgtgtaggtctccttttttcttgagagggtggagttatcttattacaaaatatatgttacagaacaatgataagaagtcctttatccacaatcacttggcatttttagtaaaataccacaaggatgaaactacagatctctctagaattgttggatttgaggtcaaaccattcaggttagttttagttatgcttgccctattttgttagtatgatgcctttcacgctgacactatcttgtttactaacttatactttttttgttaaatttctcatgccagtatcaatcaccagtttgaagggccgtggaatgataaaaacactcgtttaatcacatgtgatcctcatgccagcaagcttctggtaaactcagatactcctcaggaggttgaagccgggaaggaaatcatatttacctatgatgtaggcttcgaggtgatgtttctcacatctgcttctctttttgtgccctaacatctttccttaatactccctctgattcttagtgtagaccatttaggatggtgacacggtcttaaatgtgacacttgacctgcaatttttctaaaagtatgttttctatatatattatagaagtattttccatgttgaatctaccacatgaactgcgttgtcaagttacttaacatacattttaaaatttgagtttgttttaatgttttctgatttgcttggtattgctctgcaggagagtgatatcaagtgggcttctcgctgggacacctacttgttaatgatagatgatcaaattcactggttttctattgtgaactctctcatgatcgtactcttcttatctgggatggtggcaatgattatgctccgcaccctgtatagagatatctctaggtacaatcagcttgaaactgaagaagaaacccaagaggagacaggatggaagcttgttcatggagacgtattccgccctcctgcaaactctgacttactctgtgtctgtgttgggactggtgttcagttcttcggtatgctgctagtaaccatgatctttgctgttctgggtttcctttcaccatcaaaccggggaggactgatgactgccatgctgctcacttgggtcttgatggggttgtttgctggatatgcttcttcacgcctgtataagatgttgaaaggatcagaatggaagagcatcaccctgaggaccgccttcctgtttcctgggattgctttcggtattttcttcgtccttaatgctctaatatgggggggagaagtcgtctggcgctgttcctttcaccacaatgtttgccttggtcctcctctggtttggtatctcggttcctcttgtatttgtcgggagctatctgggcttcaagcaacctgccattgaggctccggtgaagacgaacaagatcccgagacaggtccccgagcaggcttggtacatgaaccctgccttcaccattctgattggtggcatacttccgttcggagcagtcttcatcgagctcttcttcatcctgacgtcgatctggcttcatcagttctactacatctttggcttcctgttcctggtgttcattatcctcatcgtcacctgtgcggagatcacaatcgtgctgtgctatttccaactgtgcagtgaggactacctgtggtggtggaggtcctttctgacctcaggatcatcagcaatctacctcttcctgtatgccgggttctacttcttcactaagctgcagatcactaaggtggtgtcgggcatgctgtactttggctacatgcttcttgcctcgttcgctttctgtgtgctcaccggtacgatcggcttctacgcctgcttctgcttcacaagattgatttattcttctgtgaagatcgactaggcatgttccatgggcctgcagcgagtatgcccattgcgtttttttcatgaattttcagtgcagctgtacttttggtgttagcttataaaccatttatgctcactgtggttcagagttgtacaaggataggacactactgctagctttatatggggtaattttaacttgtgctgttgagaactgctgcatacgttcaatccatagtctcgttatcgtctgccacccctttcctgcttcagctgcatgatgatgtccatacgtgcttggctttcatcaagaaaatgttagcttcatctccccagtaatatttcggggactccggcggcactcatcctcaccaggcgaataccgtacgtgatcagtttatgcaaaatattcgaagcgtatgaatgttagtagttaggtgattaatgatgggtatccattttacgaatttcggatgaaatgttcggatcgatatgtatcttgcttcggcttcgttcagatcagctaattataattttttataagctataatagtggaagtgagctagccaattgcttttttataagctagatgatcgaatacttcaaattagaccgcagatagtgtaaactaggctgtttgaatcagctataaattgttttgacagctagcaacctatatcaggggctagtttagaaacttcattttctcaagagattcttattttcctaaaggaaaataaactaatttctcttgtgaaaaggaaaattccattaaaaatagggttcccaaactagccctaataaatcaaaacaagactttagatattttatttttatgaaataatctccaggttgagtctttaagtcaaatccaaaataacctcttgtatcttttgagggcttgtgtttagaagtgaagtattttttagtttctaaagaatatcatggttttagtaaaaaccatagtattttatgtcataagggcatgtttgataatgtagttttaaaagtctatagttttgaaatccggtagtttataattgtacatgacccaaatattgcaatattgccttaccatagtaaaaccgcagtataacttacaatcgagacgtgttttgtttcattagaaattacataagaaacctgaggtcccgagtggacttttcaaatctcctaaaattccacagttttgagtacactatgatatttaaaattgtgttttacttgtaccaaccgtcggctttttaaaaaccaaaaccgcagtattatctaataacaaagtattgtct

SEQ ID NO: 5223 - DNA, 1712 bp, Zea mays
cattgggtacctcgagccggccggccggagatttggattgtcacgtaattcgtttccctgtcctccccctctcgctgagctgagcccacctactccctcccaccacttgcattcacacactcgattccgctgctctctccctcttcctctcccccgcggcggagccataaaccctaggcctcgccgtcgtcggaggcgccgccgcgatgtcgcactttggaaggacgggtccgccggacatccgcgacaccttctcgctgctcgtcctcaacatcagcttccgaaccacggccgacgaccttttcccgctcttcgagcgctgcggcaaggtcgtcgacgtcttcatcccgagggaccgcaggaccggggactcgaggggttttgcgttcgtgcggtacaagtacgccgacgaggcgcagaaggctatagatcggctcgatggccgtaatgtggatgggaggaacatcatggtgcagtttgcaaagtacggccccaatgctgtgccaatccacaaaggaagggtcaaagagggggttgagaaatcaagagacaggtcaaggagccgtagtccaaggccaaggcacagagacagagatgatagaaggcgaagtcgcagcaggagcaggagcagagaaaggcatgtccatgatagagatagggactatcgtcgtcggagcagaagtagaagccgaagtatgagttcaagccctgaccacaaaagtcatcgtagagcaagagatgatgttaagcgcaagagcagaagcaagagtagaagcaggagcaggagtagaagccgctcataccacagttcttcacctgcccggcgcagtgctagccctcccaagagcccaccgccacagaggagccccactcctgaaaagcatgccaatggaaaagattcacctctgtcacgcagtgtatctccatcaccgaagcgtgcaagctcccgcagcccaggcagcgatagcaaggaataaagcttgttgatctggtgatgcttaaagagcagtcttcccatgggattgcagaacgttgagaaggctgtttgaacatgatggcagtagcaatctgcaatcaaccgctatccaaggttgctagttgttcttttaatgacttctagaattgtgttttccagttgtcaaaatatgctgttggtttgtatttcgacctctattgtcttttaatacccttgtactgcatcatctactttatgtgcatccgtttcttgactccatattaatttgttaaaacatttgtgcattttctagttaaaaaaaaaaaaaaaaaattgctgtttaccgggagaatggtattgctcgggaccgactatggtggatgatgtcttgctgttagtctttgtcattggtgttgatatggggatgacacagctgatgatgtgacggtgctgatattgtatcgatattgatgctgatgctgcttacagtgaccatcttgatgcagtctatatttttgttcaagaggttctgaatcaaatcatgaaattccagatggatctcatgattggtaagaaaacttgtacaataatgccttacatgctatgttggttcttacccctaccctactttggcaaatgctttgcatcagttctagttggaacaaggtgcagactggcagagatgctgaggggtgtgtgtactcatagtaacaatggtactcgtcgtcgtcgtaatatggctaataatctctacggg

SEQ ID NO: 5224 - DNA, 2152 bp, Zea mays
ccggccgggaacgggccaatcaccgcgcgcagaactccaagtccgcgcacccattgggtccctcgaggccggccgggaaaccccccctagtttcttttcccccggttttttccgtcctctcctcactcgtgtccgatggctcgcccccgccgcctcctctgacgacggtctgactgacccccgcctccccggagagcggctccgctgtctcgccggatatggcgccgcctcgtccccctcctaacccggcgggggagcagcagccgcagctccacggggtggtcatcatcacgctccctcccgcggaccagccctccaagggcaagaccgtcaccgccttcgcctacaccaacgaccccccgccccctcgctcgcccccggatccggttatggggtacccggcggcgacggaggctaggcggcggccgaggcgggcgctctcgacgcggcgggtggcgacggcggcgctcgtgctgggcgcgctcgcggtcgccgcctactattgcttctactcggacgtggccgtgcagttcctggggatggagcaggaggaggagcagaggaacgagaccaggtctttcctgctgccgctctaccccaaggcgcgtcagggccgcgcactgcgcgagttcggggacgtcaagctcgccgccaggagggtcgacgacggcggaagaaaggctaggaacaggatggaggtcgcgaaggcggccacggcgaggaccaattccacggcgttgctcccgatcaagggcaatgtcttccccgatggccagtattacacatctatctttattggcaaccctccaagaccatactttcttgatgttgatactggaagcgacttgacgtggatccagtgtgatgcaccatgtacaaactgcgcaaagggaccacatcctctatataagccagcaaaagaaaagattgtccctcctagagacttgttgtgccaagaattgcaaggcaaccagaactactgcgaaacctgcaagcagtgtgactatgaaattgaatacgcagaccaaagctcctctatgggtgtccttgcaagggatgatatgcatatgatcgcaaccaatggtggaagggaaaaattagattttgtctttggtgcggcgataagctttcccagtcagctggctagtcacgggattattgccaacgtttttggccattgtatcactagagagcaaggtggtggaggatatatgtttctgggagatgattatgtacctagatggggagtaacatggacttctattcgaagtggtccagataacttatatcacacacaagcccaccatgtaaaatatggggatcagcaactccggaggcctgaacaggcaggaagcactgttcaagtaatttttgacagtggaagctcctatacgtacctcccaaatgaaatatatgaaaaccttgttgcagcaatcaaatatgcgtctccgggctttgtccaagacacttcagatcggacattacctttatgctggaaagctgatttccctgtgaggtatctggaagatgtcaagcagttcttcgagcccttgaaccttcacttcgggaagaaatggcttttcatgtctaaaacattcactatttctcctgaggattacttgattattagtgataaaggaaatgtctgtcttgggcttctcaacggaacggagattaatcatgggtcaactatcatagtaggagatgtttctctgcgcggcaagttggttgtgtacgacaatcaccggaagcagattggatgggcagattcagactgcaccaaacctcaatcacaaaagggctttcctttcttcctctgacgaagcatcactctctacataatacatgtgtaaagcgtaaatagtgaacgccattgtattgtagaatacattattaagtggagactgcctttgtgtatgggtatatcgttccattggaactgtcagaaatcctccactgtgttgtacccgtctgtaatgtgtatactatgttgtttacttgtatgatgtatgtacactatctcctctacatggagttgtcccctacacatggattttttgtagattagttacattatgaacattttcgacagaagttgggtactttacacaaaaaaaaaaaaaaatgaaaaaccgtaaaaatctgttttatc

SEQ ID NO: 5225 - DNA, 2611 bp, Zea mays
  misc_feature (2512)..(2512): n is a, c, g, or t
agctcgaattccgttgctgtcggcggccattggaggcttaaaatcttctgttgatatgctggtgacctacatgaaggagtacccaatgtgtcctcagattcttctgatctcagctcggttagacagaaagcatggtacatgtccaggtctgaaaagctttgatgagttgatcttgaattggcctaaagaggcacaaggaattcaatatatgtggaatcaatatgttgaacatgctctggccactgatgccgagttagctgagaaggtactgacttgctggtttgaagaacatggaaaggactgtgatatccaaagcaatgctgctatttgtatagaactgagcagtgaagaacctggaacatcatcacttgtttcacctcaggcagttggttctggtccatctatatcagaagatctcgtctttcggttactaaacctctcactgtataagatactggagaacaacctacaggaagcacaaatggctgcgagtaaagcattgaaattggctcatggggagtggtacgagcactgtataagagaacatgctgcaattcatgcactggagctggagaaatcatcatcttcgacagatgctcaaactcgggctacattcagtttaatcattggctaccttgctgatcattgcaacttgcccacgagggagctgctgtcacgaaggttttgccagaatattaagaagcataggcttaggcagcttatagatgatactattggttctgttcctgcagattcttctctgataaactctgtccttgaagtgtgctttggcccatccctccttccaaaaagcattagcgatgtgaagtacctggttgattttgttgaaacagtcatggaggctcttcctgcaaactatcgcctgggcttggctgttggtggattcgtagctaagcacttcacaggttatggcgcagcctccactgggaccaggttctgggcaagctctgttctgatcaatgccatctttcgagctgtacctgtcgcaccggaatcagtatggctagaaggtgcaggcctcctggagaaactgcatgccacagagattttgaagaggttctatcagcaggcggcatcggtctatcccttctccttcaagctgtggcacgcccatctgaattactgcaaagccagtgggagcaacactgagagcatcctggagagtgcgaggcagcgtggcatcgagctgaatctgacaccaacatagtgtgtcccttggatccaagctgcatgatgttttgccagtcggagatgttggtagtgttgtgttaactggagatggcgtgtagatatatcggtgatcatggtggtgtgagatcatttttgttctttaggtgcaggtttagtgggacatagtcgtcggtatcttacagcatgtgtttctgatggagtgatatggttagtaagcagtggtgaaggatacaggcatacgggcactggggcatataccatacttttggactagacgggctagagactgattttggagtccgttatgtttccattttccgttctcttggttttctctgtcgtcaatgtattataatcatgatgatgaatggatggagaaatgagatgagatttttttgagttcactcttgcagtttcggttattatatttttgtgctgtcttcgaatctgatttggtcgacggcatgtttggaagtaaagtattttaaaatcaggttttggaatacaaaaaaaaaaaaaaaacatgatataatctttgtattttttacattgctcttagcaacatatgtttggagataaagtatctcaaactataatatttagtatacgtgtacaagactagttatagacaaactttgggttggagtggagttttaaatactctaaaaatattatggtatctacaaaaccatggtacataagggcacaaggcagagttttagttttttttacaacgtagccaaacatttcttaataaaaatcactatggtattctctagtaccatggtttaccttgaaactctaaaaatacttagttttcaaatacccctaaatatatatagtactccaaaagcctagatataatcctagctaaatttaaagttacatgaggacaaaaataaacaacttcataaacagggtaaaccaataaactaactctgtaaatcttttctatttatatttaaatcaactcaactgtgtaaatcttttctatttgtatttaaatcaactcacaaccagccgccgcgagccactgccgaacaatttggctttgtagatgttggccagaaaacaacggcttcacctaaatgttgaaacgcacggccaatacagtgtgtccagcctgttctccctctccgagacaaacaacaggctggttgacgtggcccttctccagttctccgtatcctcgttggcgccgtgaactgaggactatccgccgccgtcgccgcgacctgaaactggaggccgccaccgccgcgacatggcgcactgaacgctgctgccgtgtgacgcccangcagagaacgacatggtagggagcgacacaggctcaaaacgggcacaggcacgcgggcgggggaagagaaatagacgtgagaagtggagcacatgtacg

SEQ ID NO: 5226 - DNA, 6131 bp, Zea mays
  misc_feature (2516)..(2516): n is a, c, g, or t
tccctcaagcgaggaatctccatattttggagtctctcacgccttacacaactgttctccaataaacacaagagtaaaagggggaagtttctacaaatattccaaaagtaaatttaagatgtaagattaatagttttattttataacaattagaatcggatagtatccactccatggtaaaataaatgttaataatacatttatttcatattaatacatctgtcttttttagcttttgagtttctgtctatgtgcaaatagatgattatttttctgtttatgctcaaatagttgatgataaatctaaacacataaataaaacgaatacattaattattgtatgaattaatttgaaagttaaaacgaattttatttgaattggacgttttgtcgtatattcacaaagaaatatgtgcagtcgcgggctgcgagggcggggtctggtcacggagccggtcaaggtgcagtcaagcagcgacgaggggaggcaggcggtcagagactcagagcgcgcagaagaagctggcgaatcagggcggctagttggacttgacgacttgtcacgtcccgtgcgtgccgaacttgccgtgcgcagcaacctacctaccccggcccaccgttgcggtcccgtgcatgcgcagccgggttccgctcccgcggtcaccggcgccggccccggccccgccttccgtttcagtgctcttcggctttcacgcaccggggcgcgcgcggttgcatttgcgtgcgccgctggtacccgaccgtgcccggtgagtcggtgaccgcggtgaagacttccgaggctctcgtggtagcacgacatatgtttcagcgacccgactaggcctgtgcgtggcgcgacgcgttccgatgcatggtccaagcctgcctgtttcaagcatttgttacagtgaacgagttatcaaccagatgttttgctgaccggataaggaatttttgttatttttttacaaatgttaaattaaaacaagaaacaaaatattcatgttttttcggtttgttactacgctaaattaaatcaagaaacaaaagctcgtcaaattaggaagcaaaaaaaaaatcaaatactaggcggcaatctaaggtaggaagccaaatccggcctttcttcctctcggaaaatacttaaaaggcccttgttccttgtacccgctgaagataagacccactaaaaacacgacccacatgtcagtggaatttcaaaacgctgccagttccatccccattccgaccctgccgccgcacccgccccttccccagcccatccggcccggtcccttcagattctcgacagtccgcgttaaataggccgccccgctcgccttccactcctcgttcccacacccctcaccgcgtccgcctcccctaccatctagggtttctagggttttcgaggaggaggaaatggcgtctgatagggtgctcgggactgtgaagtggttcaacggaaccaagggcttcggtttcatcacccccgacgacggtagcgaggacctattcgtccaccagtcctccatcaagtccgacggctaccgcagtcttaacgacggcgatgccgtcgaatacaccgtcggcagcggcaacgacggccgcgccaaggccctcgatgtcaccgcgcccggcggcggcccgcttgccggcggggaacgtcccgacggcggcaacggcggtgggcgaggcggatacggcggcggcgaccgcggttacggcggcggcggtgaccgcggctacgggggaggaggcgaccgtggctacggcggcggcgaccgtggttacggtggaggtggcgaccgcggctacggcggcgaccgtggctacgggggaggcggcggctatggcggtgggtacggtggaggcggcggtggaggcggccgcggctgcttcaagtgcggcgaggagggccacatggcaagggactgctcccagggcggcggctacggagggggaggcggcggcggccgcggcagcgagtgctacaactgcggccaggagggccacatctcccgcgactgccccaacaaaaggcgttaggcgcggcgccaccgtcgcgtcggatccggcggagtcccatgtcgcctctcgccgcatccctacccctccaaaggtatcgctcggctgactcttgcgtgaagtcgtcggagcaaactatctatcagtagtactagcagtgtcgtttcgttttggtctgtcgtggcgtggtagtaagaaatgcaagtgagcagcaccagtatctttccgtttgaatcagttgtaaggcagtcatggtcatggttggctctgccggatctatctgtcatgaactatctatattatatcattatcaatgttatgcaatgagtctttggcattgagttaaggtaaaaaaaaaaaatgcctttgttgattcttttggttggttttcgttcttgtgtcgtctgtaatctttgcaggatcaacttcggcgtcctttttgtgttaaattatgatagcggagtgggattgttgtcttaagatcnttttgtgttgtattatgatagtgcatagtggagtgagactgggtctcaaagagatggggaaattactactatgacgaaaattcgagttcatcagaataaaggatgaaatgtattggggggagaaggagccgaaaggtgaagagtggtcagatggatggtgtattggtgcggtaaagtgtgctgcaaaagcaagcaggcaccaggtgcagtgctgctgctgtgcagactggcactggcattgctgttttggcaacagagagcgtctgggtctgggtggcatggtatgggtctgcttcatgcacgagcacggcgccaggctctgttttgtccgcatcgcggggcggttgtggaaaagcgaggggcggtttccatttctgttgcaaagcctgacagcttagcgagaccttttatttttctgatttcctgcttcgattccaactttcatgtggtgtgtggtacgggcagtagttgcgacgcgcaatttcgcatctcataggccatgaacgatcttcattttttttccttgtcctccgctgggttaatgtttgtcccatgtattagtggcgaagccaaatcgcaatctccaaatttgattgaaacgaatcccaaagttttcatagttgggttcattccaagaaaaaagtgaaagctgatgtttcgcacggggaatcttgcttgtttcgtttcgcgccaaaagtgaaagctgtgtgtggatcacgttttcaggttacacaagtacagatctaaacatccggcctgtgcccgagtatatcagatttacggacgctgttaagtaatttgttcttgtttgccgaacgatgaaattcctgctatgaacgcttttctctctcatggaagttcagttctggaccgatacgaaaggcatcttgagtcattggtgaccattgttggggaaaatgagatatctctgcaacttattaaggtagtaaccaagttgtttgtgcaatctcaatcgtccgatgaagctcctatcccgtagcacaccacacatatcacttttttgcctcccgaccctaacgtcgcccaacgtcctcccctcaatctcaaatgttaaaccgtcctattcgtcaaaatctctcgtactgaaccatcccgtggcatgaagctgcttcgtctcaactgacttcggagctgaacattattagcgtgttttgtttgaggaatgaggtagtacatcaatttctcagtcctcactttcttgtttggtttgtggaattgaataagctgatctatcactattttattccttataagccaataatttatggaataaatttatgatacgtcatcttatttaaaatggattgattgttcaaaccaaacacccctatcttatattgacacaatttgtttcagacctgcagcatcacggctctccttgatccggaggttgcacgggtcatgggcccctgccaagcccgagtttggcccaactgcgcaggtccattcagggcggcccactcggcgtccaggaaaagccggacgagagggccgcaagtgtccgcggttgtcgagatgatgcagcttttgcttggagcttggtgagcccatggtgctcgaccacacataggagagcatataccagaatggaacccagtacgcaataatatgctgggagcctgggattgctggtcagtaccgccgattaggaccaactcgcttcctcggatgaatgaacgctaatttaaaagcttcgttcttgagcacggaagcacgaccttacttgaacaggatctgttctataggatcgtaccgttgcacccttgattattaaggaggcaaggttgatgaaccatgacctgtgggccagagcgtgattaacggctattaaggaggcaaggttgatgaaccatgacctgtgggccagagcgtgattaacggccaggacctgcttgatgtctgtttccggagctgtagaggatcgttccccccttctggggtgggctcataggttgttgacaggttctcttttttttctcagcattgctcctcgtttttaagactaacgcgccttcttgttttttccatcaacagagcaagagctacagtttttttggcactcgagaagtttcttcaaatctgacttcatgcgattgtgcgacacacatgattctttctactcgatttgcagaaagttcacagttgtttccatctttattttcttgttggttaatgcaaagctacgtattctacatctgtctgcagattctcgagtgctagtctcaatgtcttttattctcttcagtttgcagtagtgatacttcagatgtataatcttgttttactatttggttttgtttatttcgaccctcttcctttctacgcttttactgcaggctgtgcagaagttgattgacgaggaattcgaaagtattgtccatttgcggacgtcgtggtttcaaaatagagtttgaacagcacggcatggcttcatcagactttctagagcagaaaacaaacttgaggctcttctgcaggttgtgtaaactcttgtttctcttcccttctgtgcacacgcatctgtctttccatacacttgtatataaatgtatatatatacacacacacacacgagcgcacattgttcagttattgttgcttttttttttggtctgtaatttagctatgtcagaatgacggatcgatgattccaaattttcaattgataactgttgtgaaaacgtggagtatgaatagaatcgtatatccacggttaactaccatggaaaggttccagctggactacaatcatactaggaaagtagggaagagctgagcgcgtcaagaaggtaaagctagagcaggcacgaccagaatgaagcccacgcattaatattacacataataggacagcatatagcagaatgcagcggcccagtcccgccgattagcaccacctcgcttgctcagatgagggaacgctgatttaaaagcttggttctcgagcccggtaacacgaccttacttgaacaggatctgttctataggatcgtactgttgtatccttgattgataaggaggcaagcacttaaacctggttgatgatccatgacctgtgggtcagagcgtgattaacggccgccaccggctctgatgcctgtgtccggtgctgtagatgatcgttcctccgccagttctacctggctggggtggcccatgggttatctgacgggttgtcttttttttgtgtcctgcaaaaatattgctgctgtctacctcggttttgaacacatatctttcttgaatttgggattaacggggaagtttgttttggaccatgcttaactcccatgtgtgctacatgcatgcgttgggtccttaccaggcgttagttagttttgagcactgcacaccgaggaaaaaacgagacgatcctagctaggcgttagttaccggatatctttcttctgaacaagatctgtcgtatactcgtatacagctgcgaagcatggcctgtgggaaatgtaagggcgtgattaacggcttggattggagcttgagacatggtgttagaaataaatgcgacacaaataggatcaatcacagagaagacacggatttaacgtggaaaacccctccaaagtgaaggggaaa

SEQ ID NO: 5227 - DNA, 1023 bp, Zea mays
ggcgattgggttcctcgaggccccccagagaactgagccaaaagaaaaaaaaagagctactacagcaatggccggaggagacgacctgaagctgctgggcctgtgggcgagcccgtacgtgctgcgggtgaagctcgcgctcagcctcaagggcctgagctacgagaacgtggaggaggatctgagggacaagagcgagctcctgctcaagtccaaccccgtgcaccagaaggtccccgtgctgatccacggcggcaagcccatctgcgagtcgcaggtcatcctgcagtacatcgacgaggccttcgccggcaccggcccgtccctcctccccgccgacccctacgagcgcgccgtcgctcgcttctgggccgcctacatcgacgacaagatgctgcccgcctggaaccagtcgacgatgggcaagacggaggaggagagggccgaggggaagaagcagtcggtcctgacggtggagacgctggagggcgcgctgagggactgcggcggccaagggaagcccttcttcggtggggacagcgtcgggtacgtcgacgtcgtgctcggcggcctgctcgggtgggtgcgcgcgtcggaggagctgcacggcgtcaggcccttcgaccccgagcggactccgctgctggcggcgtggtcggagcgcttcggcgcgctggatgccgtccagacggtgatgcccgacgtcggcaggctgctcgagttcggcaaggcgttgatggcacgtctggcggctgcggccgccgccggtgcaagcaataactgaaaagggcatggtgtatccgtcatgtgtttcaggttttcgtatagtgaacaaaaaaggaaaaaataatgctagctacgcatcggaacgcggctttgtgctttgccgtctcgccgttagttcagcttatgtgatgtgagtgttgccgtgcatgtgtgtgttacttcagatgtatcctgttcggttcagtgattatatggaacattttattttggttggataaaaaaaaaaaaaaaaaaaaa

SEQ ID NO: 5228 - DNA, 1579 bp, Zea mays
aatgctgtggaggtcaatgaaatgtggcgtgccagggaaaaggaactggagttggagtcaaaaatgatgggcccccgggccgcaggtattcggcagcgtgattttacaggtgagaagcgcaaaagtgaaagaaaccatagctccagctcaaggattgaacaagaagggaccacttatgatacttcgtactcagaccaggaggatggtctcagggatgatgaaattgaaagatttctttattcaagggcgaagcgaggacgtggggctgttggttccaggatggacgagcctggtccataccttgattctctgtcccatcatcaggacaatggacctagcccggacatacgtgtggaagaaaaatgggaacgcagagtacaaggcccagagaagcctccattttggggatgcaagtctctcgatggtcattggcgcttgggcacattggatggaaggccatcaagctctgaaccacagagcaaaaaagaaaagaaaagtaagctggataaaaaagataagatagagaaaaggaaggaaaagggcaagaagaaatccaaacatcgccaccaccgccatcgcagaagcagcaggagtgagtgagtgatgttgcctgttagcagaacagaaaaaatggacacaacggttctgccatgaccatgagacaagctagctgactgttcctgtgtcttgaaacctgtattgtatggaaacgggatattgtgtaggcttatacaatacaatgttgcgatgtcacatcgtttgttgaagttttatcactttgattaacatctgcaacaggaagttttttttccccaaaaaaaaaaaaaaaaatattgggcgtcgaatattggagtccgaggagcctgttcttcaagcagggcagcctgtcagttggggtttgtagctgaataaaactgtgtatggatgcgtaggccatcaatagctcttagtcatattagtgcacattttctatgatcatgaggatgagttacttctcaggttccatcgaaaagagcactgatgactgaggtgaaaagggcttaagattcacagcatgtcgtaatcatgctttggggtgtcatgaaccagtcgccttctaaagctgatccaacatgggcatttttctgcttcatgggacattgcgctaagttggggctagttaggatgcacccaatagtctgagggcgtgtggcctcacgccacgcctaagttgcggcggccgaggaaaggtgctgccggtggcggcggcttaggccagctaccaaacacgccctgaatacacctatttgccacggtgattggagattattgagaataaaattagtttatttcatcctcaatctccgtggaaaattatggatccaaactagcccttagacggaagaagatacattcaccaaggcttcataatatgcccaaaacatcaagaattgcatagttatcagatttacagttgtaggcttagctgagtactgattgtcaactcaaatgcgacgctattaatttggcaccaaatcctactagttaaaaaggaaaaaccaaatctgttgagcaaagagctccgtaatgatgcctaaat

SEQ ID NO: 5229 - DNA, 1314 bp, Zea mays
gacctgcagaattggagtactcctcagaggtgcatttgtttcccaatgcagtttttttttacttctattctttctcatagttagatcatgagcctttcatcaactagggggttggggcatagtgagaaaacgttagcaaaatcatctataaaaggtgcctatagggagtgcaacatcttgtgattttttaactgaatactggctgcatacttgaaaccctttccccatggcaaattgaataaataaactagagcctatctgcatttatattatttgggatgttttataatgtttacaggttacccaccactggtaaaaaaacaaccattgactaaaaggatattaggaataaaattttgtacctaaaaaaatgcaaagtgtattatggctttatctcgcattatttcattcaaattatattagctggcagttgttattgcggggtcgcgcccgtggcccgccgcagaggccaatgtcagtcccaatagccgtgtctatgtgagcaaggcccatgatgtcatgacaaatgtgattgcaaagggttcagcaatgagacaagacgcagtgaacaaggctaaagcatttgatgagaagcatcaatttagggctaatgcatcagcgaggatcaattcctttgataaacgtgttggcctttcggagaagataaacaatgggatatccgttgtcaatgaaagggtgaaatcagtagaccaaagattgcatgtttctgataaaacaatggctgcattgctggctgcagagcgcaagctaaatgatacaggctctgctgtgaaaaccaacaggtatgtgtctgctggaacaagctggctgaatggtgcttttagcaaggtcgccaaggctggtcatgttgctggctcaagaaccagggagaagttccagttggctgtgtcaaatctaacagccaaaggccctgctgttgttgcctgagggggatgctggttatggaagctctctttctgaggaaattctattggaagtccctgtgcaaaagcatttcctttgattgtgtggacagtgtggaaaataactgtgtttcagtgttatcttgtctgtctttccttagttgcaggctattcggtgattcttttgaggtttggtgtatagatgcgttcagtttttggtattttagaaccccattcttttagtgttgaagttaaattgattataggtgatagtggcattctattgtattgactcaatctatgtggattcttcttgatcgttgatgcctatgcttcaccgcttctccccacactgttgctccaactgagaaaaaaaaaaaaaaaagcggcc

SEQ ID NO: 5230 - DNA, 1156 bp, Zea mays
ttgggaccctcgaggcgcgtgctcgcggcccaggcgcttcaccatcggaaaggccacagctagggttcgatacttcgatccccactccatctccaccgaagaccgtcgcgtcgctccgccaccgaagcagctcaaatttctctataagatgagctggagatttcctctcttcggctctcagcagcagcaagcagatccaagtttccaggacatccctacgcagtcttggtaccctccctcggtggtaggttcctcttcacgtccatccacccctacctcttctagtgctagtctacaccaaagagcttcagatagtccgcagtcttcatcccgtgggcaaccatctcctgctgaggctgcagggataattgcccgtttgaaggataagagtattgaggagttacaaaggctattgaaagacagagaggcatataatgcattctttaactcacttgatcaagtgaaaacccagaacaatgtgcgtgatgagcttaaaaaagagacattgcaacttgcaagggaaaatttagaaaaggagcagcggattttggaacttaggaatcagtgcacaataattagaaccacggaactggctgctgctcaagaccgcctaactgatttggagaggcaaaaggatgatattatgaggtcctattcccctgccgcactgctcaacaagctccaaacatcaatggcaaagttggatgaggagtccgaggagctgcaccagaagttcctggagaaggacatcgaccttccaacctttgtgcagaagtacaagaagctccgcacggcttaccacaagcaggcgttgctccatctcgccggccagacatcactccgctgacatccggccaggcgtcatggcaactttgttgtattcctgctcgcctgttcttgttctacactatgcttggccctgttttacgagtgcagcctcttgtagggatttgccgaacatcagcggatattgcatgtatagttttatgtcttgcaaaaacgtcttatgtactctgtcctggtgtagtggtgtttacgtatctagtgtccaagttgggattcatttgtggtaactaaacactttgcctattttgttcaattcgatgataataaagcttttgtacgtttgtgttcacctcaaaaaaaaaaaaaaaaa

SEQ ID NO: 5231 - DNA, 1144 bp, Zea mays
ccggaatgatagtataccaaaaagcttctcaaggaatctgacgattacaaaggatatgaaggattctatatttgtgtggtatcagctggatgacttttaccagaaccataggaggtatgtcaagagccgtaatgatgcacagctaggagataaaagtaaggcgactgactttaccaattgtgatcctgaggccaaaacggtagacggaaaaccaattgtgccttgtggtcttattgcatggagcctgttcaatgatacatataaactcattcacaacaatgtaaccttgagagtggagaagaaggacatctcttggaagagtgacagagaccacaaatttgggagtgatgtcttcccaacgaactttcagaaaggacctcttaaaggtggaaaaacacttgatccaagtatcccgttgagtaagcaagaggacctcattgtttggatgcggactgcagcacttccgacattcagaaagctgtatggaaggatatatgttgatctcaaggaaaacgatacaatcacagtccagttggacaacaactacaacacctatagctttggtggcaagaagaagctggtgctttctaccgcaacctggctcgggggaaagaacgattttctgggccttgcgtacctcaccgtcggcggactctgcttcttcctggcattcgcgttcaccttgctatacttgataaagccaaggaaaatgggagataacagctacctgtcatggaacagacccccttcaggtcgctgatgatgtgctttggaagttaaatgcgatacacaggcagcaccaaacaaattcagattatggtcggaatgtatcttgtaccacagagaaattttatccgtgctcgtcggtgtagaatatatacggcacccttgcacatattgtacattacatcgaaacacatagctttgttttctacaaaattgtatactcaaaagtttcagaagtggatgccagtagttccatgctttgtttttttgttccccttaataaaacagctaaacctaacctgcatgactgagctatgagatgaacatgagctcttcgtaagtgaccagttctcgaaggctaggcatttgcagaaatttggacttttggattccaaaaaaaaaaaaaaaaaaaaaaaaa

SEQ ID NO: 5232 - DNA, 3327 bp, Zea mays
  misc_feature (1204)..(1204): n is a, c, g, or t
catcatcatcatccggatcctgccgccggcctcttcactcaatgaagatggagagctcgctcgctagccttgagctcgacggacgccatgcagcgcagcgcagagcgcgcggatccggatgactcacctgatgtccgcctccgcggcctgcacactggcgccgtggccggcggtctctggccgcccggcgccagcatgcatctaatctagctttcccttcactcagctctctcggtcgaccgccagtatagtgctagtatatatgtcgtcgtccaagatcgcgatcgaccttctccgggaacggcaaagcgcacacgagcaggcggcgcagcagcctgccgctcgatccgcgcgcgtccatcacacagcatgcagcacagtgcgtctgcgtgcacacagccacacacacacattctctctctctctctctctctcttcatgatccgtccatcggtccatgcatgcatcgcgcgctctctctctagactctagggtagtagagtcatgaccggaagcatatcaagcatcctgcatgcatgcatgcatgcaatgatggttagttccacttcctcgcgcagagggcagagcaatccaatccaaccacaccacaatggcacaatggcatacgcaacacatcgcatgtgtactcctcctacgtactgcagctacgacaaccattgccgcgcctgcctgctgggtgctggcttgcaccctagcttgccattgccacggagatgggtgcatcatatggcacgctgggtacaaggaagcgtcacagaaaggcgctggcatgcatggcagaagagaatctgcttccttgccctgcccccctcgcttactttcctttctcctttttctctttcttttccggctggctagcccccgccccgcctgatagatctgctgccctgctgcccccacgacaccttttgtcgcaatcatatctctctctttcaaaacgagtatctgctacttcaataaacttttatctaattcatcgtcgtcccggttagcgagttatactattcacacgggattagaatgcacatgctattggataatgcgcaaaacatgtgtttggatcatgcgcagcataggaatgcaagacacaaaggaaagtaaacacggcatcatgcttattttcttccaaaattgctatggagaatgctattccataggaattttaaaggaattgataggatcnaatcctttgttccaaaggctcttataggaaaacttcccataggaattgaatcctataaaattcctttgtttttccttccttctaaaggaggaggctatagtgtccaaaattattccgtttctttgcaacttaaagtctctaaatattatatatatgatacttataagatgatgaaattatactcgactcaccgaccaggccatgacaccttttatactatagtactccagtagactgtagtacgcaaaaaggagcaagagaatttgacagcagcagcaccggttgctgctgtgctgggacacagagagagtacgcagtacggtaccattcaaatccaatcactcactgacacccattagtggtgtcacttaatgatgagatacctacggggcaaagcaacaacacgggcgtccatcagcgagcatccgcccagtgccccaagccctctgctgcaccaggccaatgtcgtcacagccagctcgcagcagcaaatttacatgcacacaagatagtgatccctaccaactatatggccatggaatggtacgagtcgctagacacaatcataccagggggcacgggcaggtgcagagccgcatctatcagtagtcagtagaggcgaggcagcagctcttttgtctcctcactggtgccaccagttcaagatccaccacacgtcgtcttgccatgcatcacacacacaaacacgcacacgcacacacttttcttttttcctttttatataggagtagtacttgctaccaacctgtcaaggtgaattcattgttgtgaatattcccgggccgggccttctcgcctttcaaggattcgaattatggcagcctcaaatgatagcagcgtagacactgtgcggccctgccgatcccacacaatggagccaaagtccccagtctgtcttaagaaggaatcattgcaggctacaaataaaaggtgctcatacagaagttttcaccaaatccacatacgcgggaagacagtacaccaagtacacagctacaggcagcagtctaaccatatcaccagagctgcgagagccatacgcagccatcgcagcagcagccaccggcggagagaaaacctctacattacctgtcatatccgccgccacccacccggcggcctccaccgtagcccctttctggcatccgatacggtgaaaccgatcggtccctccttgacctaccaccaccataaggaggcggcgagtagccccggccacccctgctttcgtagtagtcccgagggtccctgtggggaggagagtagtccctgccgtccctgtagggagggtagtcccggctgtccttgtaggagggataataatcccgactctccctgtatgaagagtacatgggaggcggagacctgcggtagccatacccgccgccgccattgccgtaatactcatcacgcccaccaccatagcctctatggaacctcccacgctccctacgctcgtaccgatggccaagatagcttccaggagttggtgtccttgggcgaccacggcgtgacttttcaactgtgatgtttcgaccttccattacagaaccattaagatactttatgcaacgctccgcttcttcaacagtgtccatgctgacaaaggcaaatccacgggaaacacgtgtatggggttcaagaacaacatggcaaccaaccacccttccatgcttagaaaaataatccttaacatccctttcagtaaccctcgaagagagcccagtcacatacagagtattcccacggttaacagcatcctcctccctctcttggcttctagatcttgacctcgcctgagatctaggatcagggacaggtgacctagactgagaccgagctggagattgtgatcttgacctcccttttgggtgccccctgctgtatgaaggggaccttgagtacctcctgcgcggggaatcggccatgtcgcgaaacggggacggggggcggcgcggcggagtggagctcccccagcggtcgcttgcgcggggctagggtttggcggcgcggtcgcttctcccccttccctcttcggctctccctttcggttgtggttggcgtgcacagcacagcactgggctctccgcaacaaattgttg

SEQ ID NO: 5233 - DNA, 3371 bp, Zea mays
ctcggtacccctggtacaaggaacgaagttttcttttttctgttctgctgggggaaacaaagaacaagaggggaaaataaaatctatatatttataacagatgaattaagcaccaagcacctgggaaaaatagaagctatatttttttcgtttacacaaatttcaaacaagttctaaatatgacaagaatcaactgactgcatttgagccaaaactttcgtacaaatagcaccaactacagtaatggacatgtagccagaccagatatcacctattcaattatcggctatttaccagagtgacacaaccagaaccccactgattaaggaaaagggcaaggaagtcaactttctgaattttgcgtctccatgaatatgttacacatcgaacctaagcatctccatgagactaagtggaacctttgaggctccatcagatgcatgttccgggaccaccttcctccaagagagtagaacagaaaacccacacatgatcctcaaactgcttgtacagtaatggtccaaccagttccaagtgcttcctgcacgtccatcatcatccgccatcacgtgagcggaactctgctgccctcaaattcatttcatatctcaggattttgttcgcccattggatactctgatacagcactgtcagcagcttgttccgggtgcttgattgaatcgatgtcagatgaaacaggcgatgctgcttctgcctcaggtgctgaagatccaagcataccaccactcttcttttcctctcctaactcggcatcacaaagcataacatcgtccatggaattcagctgcttctcactttcaacctcaataccaggaactgcagtatccttctcagcaacatcaccaggttcagcttcttcctccttccattccacaaactcgggttgactctcttttacatccggagtcagtggcctgatatcatcttcccgtttgtcaatggtaccatttgccaagacggtgtgattttcgactaggactcttctaggtaatgcgtctcgggcggagactggtagagttcgttcagaaccttctgtgtcatctattacttcgccaagaatgacttcatcatcctcttttagtgcggatatttctgaatttggagatggggaagcttctgggctaaccaaaccatcattcagtgccttgtcctcgtcaaatgcaaaccagttggaatttgtaaagagcgagccactttcttggtcgtctccaaggcgaagggaggagattactacctctgcagattcatcatcaaaatatacatcctcatcatcccgctcaagtgatgcttgagcctcgtcaatgtcctcgctactgtagataccatatttaaatgcctggcttaaattgctagcaagtgcagccacatcgtagtccctatctcggaagtcttcatcatcgctatccctaccacgatcctgcagtgatgttggtcgaccgcaagcccactggtaaacattttctaatgcattacgcttcgtcagggtactggcatgccactcaatccaatcagaattttgctgcaaatgtgattgaaccatgatgtttgtgttgaccagctgaaggagcctgttagctatccgtgtcatatgaccaacaattcctatccttgggggagatcttccctctgaagacatagtatgcttagttaaatctgacgacagagcagagttcttctctgcttccagaattcttgtaacaagtttacagtcatcaaggacatggccaatcagtcgatcctgcttactctccaaacatgagccgatgatattctcgacatggtggtgcaagaagttgttaaacgggtactcaaaaaatagatctatagcatgcttgattgctcctagttgaatcagtcgtgtttcggcagctgcactaccaattgatagaagaacagagatgaactcaacaatcttcaagcgatgtttcccgagtggaggttgtaagctaccgtatgttgttggcagaacattttcagcagatgaaacatccagcagcttcaataaatcccctaggctatccagcatgccatttactgtctctggacttgcggtgacaagtgttccatggctcaactgactacggaaagcctgataggaagccgatacaagtctcttaggatctaacaaagatatgcacactgataatgagtggaccagcaccgatttaggccttgaatcttcaaaagcatgttgaaataacctccctacgaagcttggactggaaatctttgcagcaagtgctggaggggcgtatctggttactgcacaaaggatttcagcagcatttgcgtgaacctcagcagaatctgatgtgctgaacttgtcaacaatcatctcaaggacttgtatgtcatctaaccattgcatagaatctgcatggcttgaatacatagtttcatctgcaccgattaagcgaatcaaaacctccatgatagaagtaatcccaataagatcaacaagctggctaactatttcaggatggccctgcacataatgaactagttgaagtgtcttcctcatcgccaaacaaattactaccttagcaaagtaaccagccaacaatgtcccatgagggtggtcaggttttaggaaggagaaaagcaaattcataagatcttcatcctccactaatgtcttcatgatgacatccacgtcacatgtaaatatttcacaagctataaatggaaatctaaatatccttttcttttctgcatcttcaggagcctcctctacaatgtagcagagcaattgctccacttgaaccttatcccgcaaaaaattgattaagcgggtattcagtgctttgcactcctgaattatttcatcctcatcaagaagatcctccaacttaaaattttccttgtccaaaatagtatccacaggtgatgcagcggagaatcccggcacgtgccaaaacatcttgcacagtgacaattatgtcagtcccacactgtcacgatatcacaacctaagcggatttagagctgagatttccacatcatgagctggtatccggtggccagcggaggggagacgggggctccgaacccaggcacaggcgcacagaagcccgtcgtcgtcgtcgcggcggcggcggcggaacagcgagtgagcacagcgcgccctctcgcgatccgaagctttggaggcgctcgccaagccgagctggatccgggtggccgccgcgaaaccctataattcgccaatcgcgagatgaggaggactgggaggtcggaagggcgcggaggcggaggtggagtggaggcggatgaagggaagcagcagggcgaggccggaagaactttttttttttttgtatttttttcccggccggctcgaggtcccaatg

SEQ ID NO: 5234 - DNA, 3016 bp, Zea mays
ctcgaggccggccgggccgggatgcaaccctaaccacctcatcgccggcacgatcttccccgcccccactccccggctattgcctctgattggcggctctccgggattcacgttggtccggggtacggctcctgcgattgccgccccgtggaccaggaccagagcgtggttgtcggcagcgcggactctggtgctgcggcttttggttttgcgactggcaacccccctagcttggctgtgaccggcggaagcgccgtggcccccgacggtggagctcaggcagctgatgcctctgcgtaccaggccgagcacacggcgttgaatgggactgtcggcgatatgggtaattacccatctacaggagctgcagagaacggcgaagccgtccccaacgagacgggcgagccggttcctgagctatcgtacgaagaagccgtgctttcagcagaagaggctaggttatggagtgttgttaccgcgaattccttagattttaatgcctggaccgcacttattgaggaaacagagaaaaatgctgagaacaatattttgaagatacggaaagtgtatgattcgtttcttgcggaattccctctttgctttgggtattggaagaaatatgctgaccatgaagcgagacttgatggtgtgagtaaagttatagaggtgtatgaacgagcagttctcgcagttacttattcagtggacatttggtataactattgtcagtttgcaatttcaacatatgatgattcagatatcatacgaagactgtttgaacgtggcttggcatatgttggaacagattatcattccaatattttgtgggatgagtatattaagtatgaagagtcactggaggcttggagtcatctagctgttatatatacaagagtattggagcatcccatccagcagcttgatcggtattttaattgcctcaaggaattggcttcgaagcacagtttatcagaaatacttactgcagaagaagcctcgttgtatgttgtcacatctgagaccactgctcaagcgcctgatggtgaggcacatcctgatgatgttgataagcttggtcaaccagaaatttcgtcttcaacagacgcagaaagccttgcaaagtatgtctccatgagggaagagatgtacaggaaggctaaagagtatgaatctaagatcattggttttgagctagctattagaaggccatattttcatgtcaagcctcttgacaatccagagcttgaaaattggcataactaccttgactacatcgagaaggaagaagacattaataaggttataaaattgtatgaaaggtgtgtgattgcatgtgctagttattcagaattctggatccgctatgtgcaatgtatggaggataaaaggagtctagacctagcaaacaatgccctggctcgtgctactcatgtgtttgtcaagaagcagccggagatccatctgtttagtcccccccgtccggagcttaatggcgatatttttggagcacgtgcagaatatcagcatctgtattcagatttatgccctggctttctagaggccattgtgaagcattctaatatggaacaccgactgggagataaagaattgtcctgttcagtttatgaaaaggtcatcgctgctgagaagggaaaggaacagagccagctcttaccaacattgcttattcagtactcccgtttcttatttttggtcatcagagacttggagaaggcaagggagatattaactgtgctgcatgagcagttaaatttaacaaaaccagtgcttgaggctgtcatccatctagagtcgatttttccatgcgaaaagcgtattgaatttttagactcacttgtggagaagtttgttacacctgaatcatctcagggagagttggcaagtctagttgacaaagaagaaatatcttccatatttttagagtttttggatctctttggtgatgcaaagtcaatcaataaggcttcaactcggcatacaacttttttttcatgtaagagaagcattctgccatcaaagaaacggaaggctgatgatgctgttctgtcagacagggacaagtttgctaaaactgggtctgttcagtcagccacaggaactgatccaaatgcttccaatcctcctgtttggcctgcgacttctgaaacatctggacatcaatggggagcttcttatgctcagcaggctgcatatcctgcatatggaacttatgactacagccatcaaatgccacagcctgctcctcaaacagctgcctatggcgcttatcctccaacatactctgttcaggcctatacacaacaaagctacacacaacctgcagcaattccggcagcaccagtgccagcagtggtaccagcacctacaccggcgtcagcttaccctcagcaacctgcggcagctcctcaaccttattatggaacaacctactactgacaagtagagtaatcttcgatggcgatctgacgagcctgttaatcagcaggtttgtcgatacgaggtcaaaggcatcgcaaaaccctctgtactgccattgtttagccccccttcagacagatgccgtcgacgagatgatcgcttgagaacaaatttgagattggtatagtctgcatttttgtcgttagcatgtgtcgctagggattgctattgtttttcttgtaatagcataatctttactgtagaagaggcagcgggtgctaaccaatcctatgaacatataattaacattattcactgtttcatgccacctttcggagggctttttttttccccccactgatgatagcgggattcctgtcaagcacgctcactggtgaagtcctcggaacaaaattgtcaagatctgcgactacacagttcactgatttctactgtcactgtaggtcaaactatcttgatttgactaatttggaagggagattcggtaacttagtaacaatatatgaccaaatgactattttctgaaaatgcattttgtttagaatttatcaaattt

SEQ ID NO: 5235 - DNA, 1729 bp, Zea mays
  misc_feature (1703)..(1703): n is a, c, g, or t
  misc_feature (1713)..(1713): n is a, c, g, or t
gccggccgggctgagtgtccacaaagatcccgggctgctccttcctcccagaggaagcgtacaaacctggaggggaactgcccgtctcctcggctgacccgtccacctccttcttttcccctcgtgtccgccgctacacgcgccgccggaaccctagcctccaccgccacaggcagcagggatggagaaaggagcctcggaggcgtcgcccccttgcgctcgctgcggcaagcccgctcagcttcaatgccccaagtgtgtcgaacttaagttaccgcgtgagaatgcagctttctgcacacaggattgttttagggcagcatggagctctcacaaatctgttcacccaaagcctggtgcaccggcatcccagcagtctccagaaggttggaaatattgtctgagaaaagggcgggaacgtgcattgcaacttcctcgttttgattggacaggtccattgagaccacatccaatatcaaagatgcgtgtggtgccagatgaaattgagaagcctgattgggcgcttgatggaattcccaagatagaaccagatagtgatttgcagaaaagagtagagattaagacccctgatctcatagaaaggatgagagtaacatgtcgaattgcaagagaggttttagatgcagctgctcgtgtaattaaaccaggaattacaacagatgaaattgatagagtcgtccatgaagagacaattgctagaggtggatacccatctccattgaattactatttcttccccaagtcatgttgcacgtctgtcaacgaagtcatttgccatggaattccagatgccaggaaacttgaggatggtgacattgtaaatgttgatgtaactgtatactataaaggtgttcatggtgatttgaatgagacatattttgttggaaatgttgatgaagcttccaaacaccttgtacgttgtacctatgagtgcttggagaaagctattgcgatagttaaacctggagttcggttccgagaggtcggagaagtcataaacagacatgtttcaatgtcaggtttatctgtggtgaaatcttattgtggccatggcataggggaactgtttcactgcgccccaaacattcctcattattcaagaaacaaggccgttggtatcatgaaagctgggcagacatttacaattgaaccaatggtcaatgcaggggtttggaatgatcgtctgtggcctgacgattggactgcagtgactgcagatggtaaacggagtgctcaatttgaacatacacttttggtgacagaaacaggatgtgaagttttgacggcacggttaccctcatcaccggacgtttttccatggttgaagaagccgtgatggggaacgccaccaacagcaagtgatactgttacactgggtcagcaaaaagttttgttctgctctatcagtcggccaaagctgaaattttcaaatattctagatcagagtgattagcatgctactgctgaacagtcgcagcaattgtctatcctgcggaactatttctgggagtgtgtattgttaagtcggttttcttcgagttatacgagacgtatggcttcttgagatgtgtcaccaatatgattatgccatcagtttacttttgatttcacagaacacaaaaaaaaaaaaaaaaaaaaaaaaaactcgagcccggaaaaaaaaaaaaaaaaaaaaaaaaaancaattaaaanaaaaaaaaaaaaaaaa

SEQ ID NO: 5236 - DNA, 1003 bp, Zea mays
gaaacacatcatcactttaagatgggccggctcaggtagtgggcatcaaccgattttcctacactagtagacagatttctcagaagccgcggccgtcacgcgtcagacccacgcagcgcaccttctcttctccgccgcgtcgccgccgaacatcagcatcggatcgatggagggctgggacaaggggaccaagagcacggtgggcgagatcccgctgctgtcgacgcgcgcgggtccgcgggacggcgaggcgtggcggcagcggctcaaggaggagtaccgcgcgctcatcgcctacacctcggtgaacaaggccaaggacaacgactggttccgcatcgccgccgccaacccggagggaacccgctgggaggggacctgctggtacgtccacaacctccgccgctatgagttccctctccagttcgacatccccgtcgcctacccccaggtcgcccccgagatcgagctccccaccctcgacggcaagacccacaagatgtaccgcggtgggaagatctgcctcaccgtgcacttcaagccgctgtgggccaagaactgcccgaggttcggcctcgcgcacgcgctatgcctcggcctcgcgccgtggctcgcggcggaagtcccgattctggtcgactcgggcatggtgaagcacaaggatgacgaggcggctccggctgaggcatctgcctctgctgctcctccttcgtagttgccacttgcaacaactgagtgtccggtgagctaagggcgatatcggaaatcaactcggcggtgaaccgtgaaccgccaaataagagagatacctgcaaatctaaacatcatgtgaaacatgttccatacctgctgattgctgtctgcgtactaatttctatccaacttctaaattgtgttcgcagatttttatggtacacttgattaataccataaggtaacataattgcttaataaaaaaaaaaaaaaaactcgagcccggattttctgaaaaaaaaaaaaaaaa

SEQ ID NO: 5237 - DNA, 1195 bp, Zea mays
gcacgagggcgtgccccgtgccgtgcgaccatccctcccctcatggcgtcatcggcggcgcgatccctcgcgctcgtcgcgtctgcctcggcatcgctcggcgtcgggcagcggtcgtgggctcgcttggctgtctcttcctcttcggctgggtcggccctccccaagctccgcgggctccgctcgttcgccgcctccgcacggggcgccgtgatggggaacccaggccccggcgccgttgacgccgacgtcgggatggacgccgtccaacggcggctcatgtttgaggacgagtgcattttagtggatgaacaagacaatgtcatcggccacgagtccaagtataactgccatctcatggagaagatagaagctggaaatgtcctgcacagagctttcagtgttttccttttcaactccaaatatgaattgctactacagcaaaggtctgcaacaaaagtgacatttccacttgtctggacaaacacctgctgtagccatcctctctaccgcgagtcagagttgattgaggaaaattgtgcaggggtgagaaatgcagcccagcgcaaactatttgatgaactgggaatagttgctgacgaattacctgttgaccagttcatcctccttgggaggatgctttacatggctccttcagatggaaaatggggcgaacacgagttggattacctcctgttcatggttcgtgacgtgaagctcaacccgaatcctgaagaggtggccgacgtcaagtacgtgaaccgcgatcagctgaaggagctgctcaggaaagctgatgctggggaagatggcgttaagatgtccccttggttcaggctggtggtggacaacttcctcatgggttggtgggatcatgtcgagcaagggactctgcagggggcagcggacatgaaaaccatccataaattgtaagcctgtagtcttgtagatccgcgaagcacgtgctgtgctccgttgagaaataagcgtttctgcaggtgtttgcgctgcctttgttttagccatcattctgatggaaatagtcgataaagtcataatagagtgctcttaaatagggaacataactatttatattgaaacccgtctatgatgtgtaaatttctaccgaatgaatggaattatggaaatcatagtaattggcgagcaaaaaaaaaagaaaaaaaaaagaagaaaa

SEQ ID NO: 5238 - DNA, 2726 bp, Zea mays
cattgggtaccctcgaggccggccggggggacgaccctttttccggccgtccgtggtcccttcaatctctctgcgcaatcaaactgcggtggccaaccccggaagcggcggcgggcaaagcgcgcgacgcagagaagcgtaacttcaggccgccggtcgctctacgcatcctgctccccgttctcgtcggagatccaccggggcagcctttctttccccttcctcaatcaagtcgatccaatttcgcgcgcgggtcgggctcgccttctcctccagtctccacctccaccagcgctcgaggtcgacggacgctactcgcagcagttcttctttgcggtgcggccgagaagaagctaaggctcaggcatgagcttccgggaccaggagagtggcggggaggatgggggcaggacgtcctccgcctccgacctgcggaagccgctcatcaacaccgggagctggtaccgcatgccgccggcgggtggcgtgatgggctcgcggcaatctagcctcatggagcgattgggctcctctgcgttctctctccgcgacgtcgctatctcggcgacgctctgcacgctcattgtcgcgctaggtcccatccagttcggtttcacatgtggctactcctcacccacgcaggacgccatcattgctgaccttggcctctccctctctgagttctccctcttcggttcattatctaatgtaggggcgatggtaggcgccatctccagtgggcaacttgcagagtatatcggccgcaaggggtctctcatgatcgctgcgattccaaacataattgggtggctcgcgatatcattcgcaaaagattcctctttcttgtttatgggtcggctgctagaaggatttggagtcggtgtaatatcgtatacagtaccggtttatattgcagaaatcgctcctcaggatcagaggggagctcttggttctgtcaatcagctctccgtcacgattggtatattgcttgcctacttgtttggcatgtttgttccctggagaattcttgctgttctaggcattttaccttgttcaatcctgattcctggactgttctttgtgcctgaatccccaaggtggttggcaaaaatggggaagatggaggattttgaatattcattgcaagttctgagaggatttcagacagatatcacagcagaagtaaatgaaataaagagatcattagcatcatcgaggaggaggacaaccataaggttcgctgatatcaaacagaagagatacagtgttccccttgtgataggaatcggtctccttgtcctgcagcagctaagtggtgtcaatggcattctattttatgctgcgagcatcttcaaagctgctggtattacaaacagtaatctagcaacatttggtttaggggctgttcaggtgattgctactggagtgacaacctggttgactgacaaagctggtcgaaggcttcttctcattatttccaccacaggaatggtcattactcttgttattgtttctgtgtcattttttgtgaaggacaacatagctgctggttcgcacttatactctgtaatgagtatgctttcactggctggacttgtggcatttgtgattgcattttctcttggcttgggagcgattccgtggatcattatgtctgagatccttcctgttaacatcaagagccttgctggaagtgttgcgaccctggcgaactggctgacagcatgggccattacaatgacggcaagcctgatgttgaactggagcagtggaggaacatttgctatctacgccgtcgtgtctaccatggccctcattttcgtgtgcttgtgggtgcctgagaccaagggaagaacgctagaggaaatcgccttctcattccgctgacacgtcgtcatgatctaggtatgggaagccacaccacaccatgtgtccttgagtctgccgcggtgcgttcagttcatgaatcccgcagggatcttgcagccattctcttgcttggatgtaccaccatcttcagtgttcataccaatgtacattgtacaatatgacgacgacgccatagcagaaaggcaagtgggtttatgtttgtacgatggactagtagcagaaagcactcaacccctgtacgggttgcggaggagagcaatttatttgctgtatttgcctggttcaataccggacacaagttagaattttgaaaaataaaaatctgagcaaatttatccaacaggtaaagccagctccatgcgtttgcctgcatgcggtcatgaagtagaagacattggagcctaaatatctaggaacggttttgatttagaaagaaaaaggaaggaattttattctgaaacctgggcatggttgtgcagcggcaaacttgactgctgaaggggctgatcggaattaggtaccttgtggttttgaagcgttgtttgaaatcggcgtcagcctcgccccaccatcctcttctaatcttctgaaacgggggctgcaagatctccgtggacctcggcggtgatggccgccgcgtctgccttcccatgcggcattagcgccttcatgcgacgtcggaggcccggagatcaggaaaccgtggcatgtgagaaggatcatttccatggacctcaacggcggacgccggatggcaggggcatcatctgatgatcatccgcctgctgcgtgcgccgccggagatcaggaagccgtgcccagtcaacactctgcag

SEQ ID NO: 5239 - DNA, 3542 bp, Zea mays
tggctcagtgggaaggcttctcaacactgagctaggcctatcccttctgcgccaatttttatatcacaagcattttattttgggcttcaatatcatagctggggaagcatataggacaatagcaatctgctctgtagctcaaggcctcaagtgtatagagaaaaccctttgcatacgcagattacgagaaattgaaatgttttttgtagatatatacatgtacatatgttactccttaattgcatagctctgatattctatttccatccattttttcttcttctcaacgagcagcagctgcggctcaagcagcagcacatgcagctggtgcacaggtgacagcttcgcagcctgggacagctcaagctaccacggtttcagcagcagcagccacagactcatatgcaggtgcatataccagctacccccctgcatatcagcagggagcccaggctggggcatatcagcagggtgctcaggctggggtatatcagcagggagcccaggctggggcatatcagcagggagcccaggctggggcatatcagcaggggggccaggatggggcatatcagcagggggctcaggctggggcatatcagcagggagcccaggctggggcatatcagcagggagcccaggctggggcatatcagcagggtgctcaggctggggcatatcagcagggagcccaggctggggcatatcagcagggggcccagtctggggcatatcagcagggggcccaggctggggcatatcagcagggagcccaggatggggcatatcagcagggagcccaggatggggcatatcagcagggtgctcaggctggagcatacaactatgcttatgatgctggcacggcttatgcatatgcaggttactctggctatccagttgcaggctacgcgcaaagtgcagtgcccaactattcctatgctgcacctccgcagccaacaagcagcggtgcagctacgaacgccgcaggaggccagtatggggcagttggtagtgctggatatcctactgggcaagttcagccgagcagtggcactgcaaatgcagcgcaagcacctcctcctccaccaccaccggcagcaccatatccccccagcacatatgaccaaaccagaggagcccagagataaaatctgggatgtaaaccagatggatgtttgccatgcacatttgttgagcagacaaatatggtgaaatctgggatgtaaaaccaagatggctgttctgtgcctccatcccattgactagggcgtattttcaccaatattgtgcctccagtgcaatttcttttgtgttatatatcaccaccatttgttgagcaccgtagaaatgagttccagacggccgggacagcaaccccacatgtgtctttacatcaccaccatttatccacagcgcgtaatgtaatggcatcaacatcaatatatatggttcctggctgaccacatcatcaacatccatggaacactagcggctcgtcaataaatcgaacaaatatgcttttctttcttttttccagtcacttggaaaacaagcggacgtacaaaatgacgcctttaggaattaccggagatgctccaacatacaaactgcaaaaagaaagatccaaatacaaaaccagcctgcattgtcgcttgcgaggcccctgaacccaaattccaaaccggtgcaagctagtagagcacacggaaaagcctctggatgcagccacgagccgcccgcatagaaacaaacagaggagacgaagccaagccatcgccgtccaagacgacggccacaaataagaagcgtgagggccgaggccgatcgactcatcccatacgccccgaactaaataagaaacgtaacagcggggagccggccgagccgagctggcaaggataatcctgatcaagtactactactagcagtagtttacacgatgggggcaggcaataatgcgcgccaagtaaaccaaacaaccatttcatgttgccttggtcggcactttcagtttttcttttgatgaatagaatagcggttgacgggcggacagcgaagaccgcattgttcaagggcgttggatgcatgctaagctatgctccggatatgcgagactgattcccgcgaaattcttgcggttttttttttgcaagtgacaacgagggagacataacgctattttcttttcccttgatggacataattctattttcttctacaatatttcgtgtctatgaattgaagctgctgcagcagccggtgctagatttgggagggtatttatttattttttgtcaagaacatctctactcgtatagatcagaaatgatatagaaaacctctttgagctgctcttaaaaagaataaaatatggcatatggcctctaagtaatcccttccttggtgtcgccgatcgcgagagccaggacgagacggcgacatattcgacctcccccgcccggcatattacatcagccagaaatgcttctacgcttcggcatgaccagagccgtcatcatctgcttgcactagtaattagcttccgtgtttaaaaaaaacgatgttctatatcaatctgtctctgtattaatttgcctttaagtttttttttgcatggatggagtatattatttacacgcttagatggccaatgcatggtaatggtgttatcaaaatatcaatgtccttttgtgctgcatttcaagtccagcttgtaataactgctactagtatatttgtagcgacaataggctggtagatcaaccacatcttcctttctattgttgagagagagagagagagagagatagacgacggagcagcaaccaccgtcctgacggtttccaagccgatgcaccacgaaattccacttggatcagggcaatggctcgtctgccaagccaagtagccaacgctggatgcaggcatcgctgacgccaccggccgtttcgtttgaggaaagcccgggcacgcacgccatcttgtacgcgcgttgccactctgatatggatccaacagcactgcgagcgtgcggcgtgcctgtccatttctgatggaccgccacctctctttattttgacaggtaaacgacggcagtgacacggcatatgatggggggctgacacgcgccactacggccctacgggctcgtgtagtggttgcgaatatgacgtgccaatggtgtttacatataataactgcttgctaaaaaacatttagctctagttgactttataaagtggtttacagtggctataatagaccatattgatcaaataaagacgacggttgactgagtcgagcgaagacgccagagaacttaatgatctggtggtaacatacattgaaatcacaaacatgacgtatcagatacgttactcaccgttgagcatcatctgtggcactagacacggttagatagtctagccctgagactcgaacggtccggctcgcggggtccgtgcatagacgcggacggtccgcgcgtagacacggacggtccgcgcgaatagatcgaatcagacggctaaaatcctatc

SEQ ID NO: 5240 - DNA, 2434 bp, Zea mays
actgaggtggccccccacagcgaggccggccatccctttcctttccttcacctcactcgctctctcgcctctctctccgtgcggtgactgactgggcaaccgccaccgccctccccctccgtcgggtcttcgccggcgccaccagcgacgactgggcggtctgtgtccctcttcgccggagacgatcacccaccaggtggatgtcgattttttggttgacaagttgaaggttacgaactactttgatcctgaggtgaagaagtaatgatccgcccaggctcaagggactcgcaaaattatgataacaataatcaaagagttcatccgcaaccagttgatgagaacatgaatcagaacggggactcagtggacactatgatcgggaggatattcaacaacatatcctctttaaaatctgcatacattcagctgcaggaagcccacaccccatatgaccctgacaagatccaggaagctgataaacttgtcatagaggagcttacaaatctttcagagctcaagcatgcttacagagaaaaacatcctaagccaatagctgcatcccctcaagattcacgcttgctctctgaaatacaagagcagcagaatttgttgaagacctacgaggtcatggtaaagaagttccagtcccagatccagactagagacactgagataacccatttacagcagcaaattgatgaagctaaacttcggaaatcaaagctagagaagaaactgaaacagaggggcctacttaacagggagtcagaggaatctgacgaagaagagaactacttttccattgaattgacgccaagtttgtttacatctgctgtcgataatgcataccagtccatacatgaattttcaaagcctttgatcaacatgatgaaggctgcaggttgggatcttgatggggctgccaatgcgatcgaacctggtgtggtttacacaagaagggctcacaagaagtttgcttttgaatcctatatttgccaaagaatgttcagtgggttccaagaggagagcttttctatcaaggattctaacatcagtgtttccaatgaggctttcttccaccaattccttgcagtgcgagccatggatcctctggatgtcctgagccagaaccctgattcagtattcggaaagttctgtagaagtaagtaccttttgcttgtgcatcaaaaaatggaaggttctttcttcggcaacatggatcagaggaactacgtcatgagcggtggccatccaaggacacctttctaccaggcattcctaaagctagcaaagtccatatggttgctgcacaggttggcgtactccttcgacccaaaggcaaaggtgtttcaagtgaaaaaggggagtgaattttcggatatccacatggagagcgtcgtgaagaacatcatcctagaagaaggtgcggagaggccaaaagtcggcctgatggtgatgcctggtttcctgatcgggaccagcgtcatacagtcccgtgtgtacctttcagatgccaagtgtgctgactgactgaagattgcacaaggagcttgagggggtgcctttgctccttgggagagctaccagcagcataagtttatggtggactgttgtcttgtatgtaatgcgtgagacctgttgcttcaatgccgtgctacgtgattctgtccagtgggcttgtggtttccccatgttgcatttccatgtgttatacggctatgtaattctgcccagtgttttgcacacattatcagggtgattgattgatcgtgtaggctgcacttttcatctgaaatgtgtttgcccaatcaatcagatgattctgttggtgttccatgtcaagtgttgtagcttagtttctttgaacaaggtgtgtggaggattttgatggacaatgataaaactgatgacaatttagttgcttcatatggattccagcaaaaacatttctcggtcagaggtgctttaaccatttgccgatgaggaattcgacgaggacgacgacgacctcgatgacgaagccgccgcggacgacggcgaaccctccgcgtccccatccgaggcggctcgcctcgaggccgtgctccggcggctcaccgcggacgaggtctggatccgggtgcactagatattgcggctgcaaatgaagatgaacaaacgactgctacttcgccacctagaagtgtcaaatgggtagttaagaaaattacccctcgaaagaaactgaagaaccgtgcttatcacggacagtagatctgaaaaattgtgtgtaataaactgtgatgttcccagatctgaatgtgaaccgtgcatgtaccaccgacttatgttcccagatcatctgaaatgtgtgcttgtctgtctgtttattgccagatttagttcatgtgctaaaggaaatgtgtgcttgtctatgctgggatttttgttc

SEQ ID NO: 5241 - DNA, 3967 bp, Zea mays
  misc_feature (3416)..(3416): n is a, c, g, or t
  misc_feature (3429)..(3429): n is a, c, g, or t
  misc_feature (3959)..(3959): n is a, c, g, or t
cggtagcatttctcacttgatgtcactaaagctttgttaatcaattccaggttggtaaattctcccaagacgatgtttcaagatgtcctgagaaaacagtgaacctacaggatctgcagaacagcttgattgcatctaaggagcttgtaaaagtacttgcccacatatggggacctggagaactgaatccgtctagtgtatcactcatttctgctctacgttcagagcttgatgttgcccgttctcatgttagaaagctaatcaaagaaaagaagtctaatccctatgaaattgaggacttaaagaagcaacttgcagaagaaatggaatcgtggaaggtcaaacaaaaggagaaggttgcaaacgctctccaatttatagtttcagagctagacactgagaagaagtcaaggaaaagagcagagaagacaaataagaagttgagtgttgccttagccaacactgaagcctcactgcaggcagtgacgaaagaacttgaaagagagaggaaatctaaaggaagagttgagaagatctgcaacgagctcatcagaggcattgacgaggacaaagctgaggtggaggcactgaagagagaaaccgagaaggcacaagaagagctccagaaagagcgtgaaatgcttcaacttgcagacgagtggcgtgaacaaagggttcagatgaagctgctagaagcacggcttcagtttgaggagaaaaatgcagctgttaatcagctgcgcgatgaactccaagcttatctggatactaagaaagagcaggaaccaatgaacgatccaatgcaactatcccacgcgtctgaaaatggcgccaccgcagctgatgatgtagtccctgacagaaatggtggaaacttcagcgaagacgactcatcggaaggcagtgacatacactcgattgagctgaacgtcgatggcgtcaacaggacctacacctggagctacactccttcctcgaaaggcaggcagaggagcgcttcgaggcatgaatcgttttcggatagagggatggacggcgtgaactcgtggcgtttagagcaaagctttcggggcatggatgaggagctggagggagactgggcggaagggtgtagcaacggaatactgaccatggatcacgacgaggagaggtacctggcaatcaagaatctcagagagcagatgctggccgggtcagggttcatcctatcacaaggtagagaaaatgctgaaagagagtgttgtggcttgtaagataaactgcatatgaagagaattttaaagtaatgtgtcatatgggtcgctgtttgatgctaagatccagctgttcgagaattttaaagttatgttccatgattctgaggtcttgtatgtgtgttgctgtccatttaagtggccggaaatagtttataaaaaaaagcgcccggaaatataaaaacaaaaggaaaacgttcatctaatgtcctttaaccattgtgtgagtccaccaacttaacctgtctgatttagcttcttgagcagttttgactaatgtagtgttacatcaactgtcctccgtggcgccgtcgaccacaagtaaactgaacttttataatagttgaagggggtgaaataatcgttctaaaagtcattcaaatatatatattttagaataaatatatatttaaaactactaaatctgattcaatattagaaaatttattaaaaaaaattagcttggagaaatatggtagtagtttaagagagaaaaatcagagtcactcaatagttaaggaggtcagttacaccccttccaacaaattttttttttgaaattcttccaataaaatattgaaatatatctaactttgaaacatttagaactagaactggaccacaggccaaaacctgttgaatctttacagagaaggaatctttataggtttagactattcttttttaactagagatgataatagataggtgtaatgctggtagagcaaacacccatctatattgacacacatcaagccacaactgcatttaaaatgtcaaacaagtagatttttacgttcggacttgtaccggtatggatgatcgacaattacaaataattaaaacaaaagtgtcacaaatagcaaggtaaataaatataattatttataatcatacgatatataatgcatacgatatataatgtgatataaattacatttcaaagaagtgaagatgagtagatgatctagagtttcattagattagttcaaaagactcagctagtattctacggctcattgggtactcatggttgaaaagtcgcccccagttctaaaccttcattttacaggtcgagtcaaatgtagacccatgaatggaatttaataactagaaccacatctaatatatatgaaactctgggcgttggcgtcgattcggtgccaaacactagaatgaaccacatggcagtgctcttctaaaccttcattttacaggtcgagtcaaatgtagacccatgaatggaatttaataactagaaccacatctaatatatatgaaactctgggcgttggcgtcgattcggtgccaaacactagaatgaaccacatggcagtgctctttatggaaacgcggacagtttgcaatgtagagtcggacggtccgcgacctcgctgcaggatctgctccttctctgcatgctttcggatggtccgcgcttgtagcccggacggttcgcaatgacgcagagtattcttcttcgcatgaaccaagatctcgcctcccgggagggacctattggggaggagagattgtagggtagacttggggtcggcagaccacacaagacgcatttagacgacgtcgagccgaagagaagtgaataaataggttgatggaagactaatactaaggctagattactcctacttctaatgtatggaaagaataaggcaaatgttggaatcagaccactgaaacgtggcgtgtccgtcgggccgcccgcacacacggcgcgccctatccaggccgtcgggccacgacacacacgcccacacatataacagcgggctttaagtctgttgggcttacactcccccaaaaagctagcccatcagaggctgcaccatcaaccatataaatcatgcttgctcacccataatacacaatgtgagactattcccaacaatctctccctcacacatagttagccgagatttgtctaaaataacactgggccaaactggctctgataccaattgttggaaccagactaccgacacatgacatgtctgtcgggccgcccgcacacatggcgcgtcctacccaggctgtcgggccatgacacacgcacacacgtatagcggcaagctttagatctattgggccaatactcctccaaaaagttagctcatcaggggttacaccctcaaacatataaancatacttgatcanccacaatacacaatgtgggactattcccaacagcaaataagataaatgtaataaattagtttgattggattgcgtcctgcagtgttaatcacccatacccctttatttatataggaggggtttgcaactgtttcaagttggttaccaaacaaatcttgttgagtttgctgacaaataccgcaaaaaatcagaaactcgaactaattctgtttccgtgcagaccgttcgcgccgccacgacagaccatgcgggccacccgtcttaacgtgaacagtgggcacctaaacttatgcctgtaattgttatccctattccaaacaatctaaaatctatttttttcaaaccaacgtaattttatcttgaagtaatctcttttcacttggcctcaatcggtggttgagtccttggggcccttctccacacatagcgtctcaccctcggcatactatagatgtccaggtgggtcgggcttgccgagtggcccaaaacccggcatgggtttggcccagcccaatcccggcacaacacanagcgaaga

SEQ ID NO: 5242 - DNA, 1691 bp, Zea mays
ggggtaccctccgaggctggccggaagtctcctgtttcagctctcttcccttcactccatcggctcgtctgctcgaggccgcatcgggtgtagcgtggccccccctcgtcgccaccccaatcctcattccccaatcccgtccgcttctctccccgtcccttacctcgcccaggaggggagcctcccgcttacaaaccctagcctctactcctctgagcttccaccgctccgctccccatggaggacgaggacaccggccccggcgatgggggcgaggcctctcctccgcaccacgtcgcggcgtcgagcgaccgggcgcgcgacatggtggcgtccccgaccagctcgcgctctgtgacgcagacggtgaacgggtcccaccacttcgtgatccagggctactcgctcgctaagggcatgggcgtggggaagcacatcgccagcgagacattcaccgtgggcggttaccagtgggcgatctacttctaccccgacgggaagaaccccgaggacaactccacctacgtctccgtcttcatcgcgctcgcgtccgacggcaccgacgtgcgcgcgctcttcgagctcacgctcctcgaccagagcggaaagggcaagcataaggtgcactcgcacttcgaccgctccctagagtccgggccgtacaccctcaagtaccgcggatccatgtggggctacaaaaggttctttcggcgtactgctcttgagcaatcagattttcttaaagatgattgcttgaagataaactgtactgtgggtgttgtagtatcaactatggattattctaggccacattcaatagaggttccagagtctgacataggctttcattttggaacgcttttggacactcaggaaggtgtagatgttatttttagtgtagcaggagagaagtttcatgcccataagttggtattggctgcccgatctcccttttttagatctgaatttttcgatcatgaattgggtgaagagaagaatggaactgatacgggggatgaaatcaaagagatcgttattgatgacatggatcctgtagtgttcaaggctgtgcttcattttatctacagggacaatcttgttaatgatgacgagttgtctgcatcaagctctgactgctctatctttgatagtttgtccgggaagttaatggctgcagcagacaaatatgagttgccaaggttaagattgttgtgtgaatcttacttgtgcaagcatatttctgtaaattccgtggcaactactctagcattggctgatcggcaccatgctatggagcttaaatccgtttgcctcaaatttgctgccgaaaacctgtcagctgtgatccggactgagggtttcgactatctcaaagacaactgcccatctctgcagtcagagatactgcggacagttgccgggtgtgaggagccatgtagcagcggcttgaaaagccagagcgtgtgggcgcagctctctgacggcggcgacaccagcgggcgcagggtgaggccaagggtctgagacgcaaaccccgcaagcactgacctttgtaatcaaaagctgtcgtggtgtaaatgggacggcttttcttaattttcacttgagacaacgattgaaataacatgattgacgtgtttgtggtgctcgcagacaaaaaaaaaaaaaaaaaacggcacgagccccacatt

SEQ ID NO: 5243 - DNA, 2387 bp, Zea mays
cctttaattttttttggggtcgcaagatactggagggcattattatttccgatgttccaagaaaactcgtgtatagagcaggtgatacaaaataaaaggtactacaaaatgttgtcagtttaagtcttgccgtgcgcaaaaaaacaggtgggcttgtattacaaggactagcaacgggccaacaacacattgctaactaaaaacctatgaatactggtcaacaaaaatcgtaagatgtacattctcacaaattacagtcatatgtaaaatgaaactgctccagataaactatcaggcaaataacagatttttgtactctaaaaatcaagctattattggcctgtagcttctgtttgtagagctcacgacgatctgcattggtgtcagattaggccatatgggcccaccacgtaatgatctgcacacttatgaacgatcttcgtcatgtgtatgatttgggacctctccttgattgtcaagtggcatatactgcgccatgatagctctaatctcagagtccatgtatgaccttagtctgtatttgtacacaacataacttcccgctgccacaacagcaacaactatcaagataccccacactgcagcccatgctgctttagcctgaactgctgtcttgcttatgcaggtgtcatgctctctgatgtacaaaaggtcaccactgcaagtgcagtcatagccaccccatgtatctttgcagttgcattcaggacactgacaagcttttttctccttgcactcatcaatgtcttcacattttttaacgccgtcccctcggaaaccagctgggcacaggcatttcccatctccagattcctggcaagcagagaatgtttttccgttgcgagtttcatgccaacatcctccatggtttatcaagcattttcctggtccagcaggttcacaattgctgtagccatcgcctttaaattgtacgccattgaaagtggggcattcacacactctaccacggaaggtgtccctacaggctgttacattagcagatttgtcttgccagcagcccccgttgtcattcagacactcatttgtctctatatcatcactcaggcaaacatttggttctgtagtttcctcaaaaccagcacaaatagctttgaggacagctttcctctcaagcttccctcgatattgccggttgttcacaacaagtgtaggcaatatagtaacatctcctcttgaacctttcccaatctgagcatcttgttccattttaagtaacgggtggtcagaatcagcatttgggtctcccatgcatttatcgaccttcttcacatccagacctagtgatttgatgacagtttctgcacattttttattgtacttcttctccttcattggacaccttatgtgaaaatcagtcacataatcccaccagacccatggtttcttattttcgtttgcaactttaaacacacataactgtctgaggttctctaccaccacatcctttccttcgtagcctgtgctaaaatcttgctctggatcaggtgcacagtaccttccatggtttatgcattgagacttgcattgtttactgatcacaaatgcttgaggacagtaccaagtaatgtaatggggcgtgaattggctatagccacctttctcaagtagttgggcagctcctttaaattccttaagaaaattcatcagcatatcacatttaggcccgcattcatcattgctgtttgtccataactcatactcaacacggtcatctggatgtggaacagcctccctccaatcaagattaacattaaccatttccccatctttaacagccttcttcaactggtcaccaaatttttcatctattaatgcagaaggaatggttatgttttgtatatactttgaagcctcgtcatcttcacgaggtaaatccattgttatcaatggttcatccttgtcatcaactacaagtactgcagaggcaccagcattttgtgcattccaaaccttcttcgcaaataagcactcaccgcggtcgatgaggaggaacgtgggcatcgcgccaggcttggcacggaaggggtgcctgccgtcgaaatcgtcgcaagccttggcgttgtccttagggtagacgacggcgcccgccatgctcccgccgtactgtgggattccgaagttccctatagcgctgtcgtgtcgtccccgcaacgaagtcggcgacgtcaccatcaggctgttcttctccacaacgaagcgcgcctccgccgccgccgccgcgagcagcagaagcagcagcagccgaaacgcttgcgctcccatcgcgtgcgagctccggcgcatcggaagcgaggcccaacggaaaatagtcggatgcagttttttccggccggcccgcccgtacc

SEQ ID NO: 5244 - DNA, 2325 bp, Zea mays
gccggccgggcccggaaatcctagtcttgtggtggtgtgctgtgctgtcgtctctcgccgcgcggcccgattcttcttaccccttcttcgtcaagccgcagccgtcgcctcccttcctcaccaccatggtgtcggacgccagcaagaagaaggccgcgcagaagaaggcggccgccgccgccaagaggggagccaaggtcccgaccccttcatcttcgtcctctgccgacgctaaatccatcggtgccgtggccgcgctcaagctctccgatcgcacctgcaccggcgtcctcgcctcccacccgctctccagagatatccacatagagtctctttcattaacgtttcatggccatgacctcattgtagattctgagttggagctcaactatgggaggcgttatggtttgcttggccttaatggctgtggaaaatctactcttctcactgcgataggctgcagagaactccctatacctgaacacatggacatataccatctcacccatgagatcgaggcttcagacatgtctgcactacaagctgttgtttgttgtgatgaagaaagagtgaagttggaaaaggaagcggagattttggctgcacaggatgacggtggtggtgatgctttggatcgtgtatatgagcgtctagaagctattgatgcatcaactgctgaaaaacgtgctgctgagatattatatggtttaggttttaacaagcaaatgcaagctaagaaaactcgagatttttctggtggttggcgtatgaggattgctttggctagagcactcttcatgaatccaacaatccttttgcttgatgagcctacgaatcatcttgatcttgaggcatgtgtctggttggaagagacgctaaagaaatttgaccgcatactggttgtcatatcgcactcccaggactttctcaatggtgtgtgcactaacatcatccatatgcagaacaagaagctaaagttatatactgggaattatgaccaatacattcagacacgctccgagcttgaagaaaatcagatgaagcagttcaggtgggagcaggagcagattgcatcaatgaaggagtacattgcacggtttggccatgggtctgcaaagcttgcacgtcaggctcagagcaaggagaaaactctggcaaagatggagcgtggtgggctcaccgagaaggttgttagggacaaaatactggtcttccgcttcacaaatgttggcaaacttccaccaccagtgcttcagtttgttgaggtcacgtttgggtacacaccagataatctcttgtacaagaagcttgactttggtgttgacctggactctaggattgcattggttggtcccaatggggcagggaagagcactcttctgaagctgatgacaggtgagctggttccattggacggtatggtgagacggcacaatcacctgcgcatcgcacagttccaccagcatctggcagagaagctggacctggacatgtcggccctgcaatacatgatgaaggaataccctgggaacgaagaagagcggatgagagccgcagttggtaaatttgggctgtcagggaaggctcaggtgatgccgatgaggaatctgtctgacgggcagaggagccgtgtcatctttgcgtggctggcatacaggcagccgcagctattgctgctggacgagccgacgaaccatcttgatatcgagaccatcgactccctagcggaggcgctgaacgagtgggacggcggtctggtcctggtgagccatgacttcaggctgatcaaccaggttgctcatgagatctgggtttgtgagaatcaggcagtgacaaggtgggaaggcgatatcatggatttcaaggagcacttgagaagcaaggcttgtctatcggattaagggaaggccttggctttccttaccttctctttggagatgtattatcccttgtataattatgtattattataggccctccaagttttactagtagctagctgatcatctgagcaagtacctctgtatctgtatcctgctgagtctcataataagaagcgaaagttttgtagtactaacgtaattgtcacggcaggaagtgccatggagagcaaggatgcgggagaagagaggctgggagactgaagaagcaggaagtgcgtggtgtgcgtgctgttgggctcaatgtgtgtgggcgtgagtttggtgggttcggcccatgtaagtgacctataattctgtagcgaactgagaataaggcagacaagccatagaaccagagaaaagttcccaaccgtaacactggcagcgtacctggcggctgcag

SEQ ID NO: 5245 - DNA, 3390 bp, Zea mays
  misc_feature (8)..(8): n is a, c, g, or t
cccgcggnggcggccgctctttaactagtggatcccccgggctgcaggaattcgcacgagaccattacctagaacatcctcgtggatctcatccatcggaggtgctctcctcttcggcttccttcggcttcggttgcaagaaagaaaaaggtcacctcttaacaccaggccgccgccattgctgctccctttgttcgtttctcggcaccctcgatcccgagcgtggttaatccacgcatcgaccggcgaacgccaccgtatcccatctcgaatacctccgcgctcagcgtcatggacggcttctccaaaacgatcggcggtggtggccctaacgttccggcgggatcccaccccgcgggcgggagccaggcggcggcagggggaggcgcgacgcagcggacgcagtatccgtatgtgactggtacttcagtcattgccttgaaatacaaggatggtgtgatcatggcatgtgacactggagcctcctacggatcaactttgagatacaagagtgtggaacgcattaaggctgttggcaagcatagcatcattggagcaagcggagagttcagcgatttccaggagatcctgcgctatctggatgaactaactctttctgatcatatgtgggatgatggaaattctctgggccccaaagagatccacagttatttgacaagagtgatgtacaacagacgcaacaagtttgatcctctctggaactcactcgtacttggtggagtgaaaaagggtccaaagggtgatgagaagtatcttggcatggttaatatgattggtacccacttcgaggaaaaccatgtcgcaactggatttgcaaatcatctggcgatcccgatactccgtgctgaatggcgcgaggatatgacttttgaagaagctgttaagctggttgagaagtgcttgctggtcttgctgtaccgtgacaggtcatctatcaacaaattccaggtatgaacctattgatcttcgttacagattgctctaaccagtaaacattcaaacaaagctgttcagctggttgagaagtgcttgctggtcttgctgtaccgtgacaggtcatctatcaacaaattccagattgccaagatcacaactgaaggatcaaccatctacccaccatattccttgaagacctactggggcttctctcactttgaaaacccagcccagggcgctgtgggatcatggtagattaatgcgccgcgcacgccgcatatcatgccatgaacttaggcgaaaccaatctgtgctgctgaaatcgaacacttatgaacgtttgttctgaacatcactggaactctgcatttgcttgtatgacatgcttatggttcagcgagtttaattccaacgtttgatcacatgttgtgaatgtggaaaatggattgtgcgattgcgacctcagatgccgttgttgattgtactatgttgaaaacttgaaatgctaaattagtataggtaggtgacctttgccttgtggtcgttgcgtgaactctgatttctacggtttcttgcgtttgctttatgattcatgctagtgttaatgccctctgcgagtgatgggatcttggtagtctgtagtagatgcacaaactgtgttggcaaaactttccatgtacggatctaggagggaggttctccgtcagttaaagattccaatttttgacggaaagcgataccatccccggccaaaactactgctacgatgagaaagcgcaatgagaaatcaacaaagggtacaaggcatgaagacagaatcctgaggtacaacaaatgttgaggaatgtacatgacaaatctacgaagggtgcacttgctgtatcattcatggtaaaactgtgtcactgacacgagagcattaggcagatttgttacaaggcatggaacggcccaagattaaccactactattctttcgttacaaagaggctgtacaacaaaaaaaaagaagaagaatccggagttaaaaattgttgctgctctcaacgaatgtcgacaaatacctaactactaactgcctacgatcctcgttgctttctttacttgacaactctattgctcagcctctcgagctgcggcacgccgtagcttgcagtgagttccatgaatcgttgctttaggacttctagctgtcctagcaagtcgccagtagccacggtagtggcaatttgaccgttctcagactccgtgggttcagggcttctttcgttgtaccatttgactgcttctaattattgtaatttagatacaaactaattaagttaatatattagtataggtgatatatttatattttatcctaaatcatattgaggagatagttatacactacaatccggttaggaataatttcaggctacgtttccgtatgaaccgaacagacccatagtatagtgcctgtcaagtcacaagtttctacttactccctccagccatagtgcataaaccttatggaaagctttcaggtaaatgctgtctccagcaacgttctctaaattttatttttaaaggaatattatatgttctttacaacacactttaaaagattccgtcatctatattttcacatctccaacaacttaccctaaatttcatctcagtcttatcctctatatttttcctaaccatattaacgaaaattcattgatttttcgtatcggctcaaataaataaacttttagcattttacaaattattattttgagcgaacgaaaaaaacaatactgaaaataacaatacaatcaggagggggcatgggctgatttcttggatgagaaattgaaattcacgtggaagacagaatccttccttgtctttgttgggagtcctatcatcattgttacagtattatgcacagactgagcgagtggagagggagccgccacattagcggacgctggcgactggcgtcgtcccctgcttgagccttgaggctgtccgcagcggcgcctgtaaacatcaactgtaaatttttacagctcttatccatgctgcagcggtgaactgcaacaggaaccgtaaaaaaattacagctctcgggaacttcacagctaggcagctagcgcaccttctactgtcagttaggtgcggcgaggaaagaggtgaaaataaataataaaatatgtggtagttggtatagggtaaatatttagagtgaatatgaccgtggagtattatgagagtagataatcttgctgactaaaatgaaatatttcttttaaagtagaaatgtagggttctatgagtgcggatagcatccttactggagcatttaacgcgtgttgatggaggaacaaaagaggcaagtgcacactaaatatagcaaagagatgcatgtaacgaacctcgttgggaagagcaggaacgccttgta

SEQ ID NO: 5246 - DNA, 5453 bp, Zea mays
  misc_feature (5308)..(5308): n is a, c, g, or t
tacggatttttttttttttttttttttttttttttttaataaaacaaattcctttgttccagggtccgccacttgttagtacctgcgtatgcgtatcgccctcggggccttcggccggtgcttttggcgatcaatcgaaacacaacagcaacatctattgccaaccgtcgagtcttgtaatatcaaaagacattaaaattgcacgtacataaggctcacacaggaccggaccggaccggagtacttccattatggtagcacagcgtacgactccctcccttaaccgctacttaaacaacaagcaatagtgcaatacaaacgaacaaagttcaaacgtaccttcagaacggtatagtaacacttggtgcatgcatgcaaatcgaccgactgcgtcctataccatatcatatccgatccatcatgcatcggtgaagtgcagcactgcactggtagatagcgaagcgagcgatagatagatagcagccattgcattgcaggtacgtgctaggcgtccatgcgcgccgggtactggtcgatgcagtccagccaggggctgcgcgcggggcggcgcacgcggcggacggcgcgccacaccgcgctgttgcacttgaagcccgacccgaaggcgagctgccagacgcggtcgccgcggcggacgcggcccttggcctccaggtacgccagctcgtaccagatgctgctgcttgaggtgttgccgaagcggtgcagcgcggcgcgggaggcctccaggtcggcgtcgcgcaggcccaggttgctctgcaggtgctccagcacgtcgcggctggccgcgtgcatgcagaagtgctcgaacgcgcgcttgaagtccgggatgtagggcgcggcggccgaggcgtcccctggggtggtcggcggcgccggcgtggaggccttggacgggaacaggtggcggaacagcacgcccgcgaagaagagcagctgctcggagaagggcagcaccaggggccccagcgtggtgatgttggtcttgagcgcgtggccgcccacctccagcaggtcgcggctgatggacaggcccttgatccgctgctcgtcctcctcctggtacacggagcggaaggcgcggtcgtccgcgcccttgtgcgtgcgcaccacgtgctccagctggtacttggcgcggtggaagtcgcggcgccggttggacagcagcaccgccgcgcagccggcccggaagaaggcgttcgggatgagcatggagcgccgcttcccggggtaccacgtgaaggagacggcctccgtgctgaccaccacggccaggccagcgccgctggcctggagcatgtcgcgggccagatcgatggcgatgacgcccgcgctgcagcccatgccccccaggttgtagctcaggatgttgccgcgcatcttgtagtggttgacgatcatggcggacagggagggcgtcgggttgaagaggctgcagttgaccaccagcacgcccacgtccttgggccggacgcggcacttgtcgaacagctcgtccagcgccgcgaacatggccgtggacgcctcggcgcggccctccttcatggtggcgcagctggcgttgggctcgaacacgcagcgcggcatgtacgactcgtcgccgatgccggacttggccagcagacgcgactggaacgccaggctgtcctcgtcgaacttgccggacttgcgcgccaggtcgatgaactccgccttggacaccttgggcccgtccgccggcacacagcagcatcgcgtcacatcagaatcgcatgattacatatagtactgcatcatcgtctgcagctgctgatccatccatgcattctgttcccaaccaaaacacaatctcttcttccctgtacgtgttccgaggctgcgagaagcagcaagcacaaccacatcatcaggctacaccctttggaacacacggctcattgattgctgggccgatggaccgagcgcccaaccgtttgtgatgggtgtggtgacctgtgacctcaacccaacggaaaccgttttctatcatatcgtaccgtacctgccccggccggcccattcatagctgtgggcccagaggcccaacgctcatctaatgcatgggatgagagcctgcaaacttagcgctgacttctaaaaagtctttcaggcacattacatgctgataatgaccgattatgttgatggatcgggaggttggaaggattttagattcatcagagagtagggtttttcgggcatgtggatgtgctctgtcggtgtagtgtttatatggatgccactgtctgcaacatttatgggccttcaagtggtggcagctggccaatgctgtgaccatattaaaggcccagcacggccctgcaatggtactctaccagtgcaggtacgggtatagagcgtgtagattgtacgtccaccgatgtgacaggccacatcacatggctgctagctgtgtataaatgagttcatatacccatgttttaattcacccttccactgctacccctttcttattacccatctttgtatgtccctgcaactttgcctagtattttatttgtcattctaaatatttcaataccttctatatcattaggatgcagtttttcacccttcaaacaggagtgttagtgatatagaaaggattgcgacatacaatcttattttacttttctataccagttttgatggcatggaagaacatacatctatcccaggaaggtagatcagatgtgacatgccttccttgtacatgcatgtacttgcgtgtgagcgccatgactatcaaatgtgtggcaaagtaagcagtagcagtaggaggctaggagcttataatttatacttccttcgtttctttttaattgtcgctggatagttcaattttgcactatccagcgacaactaaaatgaaacggagagaatatataaacaatcaaagaaagtaagtcaggctaaggaagaaattaaataggcctgaagcatgtttagttattactacatctagctagcagcatatgactatataaatatattgcacgcaaatcatatgtagctaagctagtgatggacaggagtagtacgcatgctgtatctatgcatgcacgcacgcaccttgagctcgtcggccggcttgtagcatgcgaagtcgatgaggtacacgggcctgggcctggacatgatgtagacggagatggtgaaggcgaggacggcgaggaaggcgagcacggtggcgaggtcgtaggtggcctccccccacaccttgcgccacagctcgtcgcggctgaggctgcccagctcggcgccgcacaccagcacgatgacggggatggtggccaggtacacgccgtggctgatgaggtagtggtacccgaggcgcacgtacttgaggttcaccgactgcaggaagtccggcaggcggcggcgcacgcgcaccgagaaggccggcgagccggcgtccgggcccgacggctccacgccgcggttcacgatctccgtcgacagcagcgcctgctcctcccgcgccatgatggccgagcgatcgatcgatctatcgaccgaccgaagctagctcgcgcgcgctgctgctgcagctggtatggatccggggcagtggtggtggtagtgagaggtgaggggagtggaaagggtccagctagtattattgatatatagcagtactgctagcaggagaagaggagcgtgcagctgggtaggggaggagatggcgggtgggtgggcggcagttaatgccattagagagcagggcagatgggcagggacggactgatctgatcatctgatggagggggggaagcgggaggcgggagctcccgcccggctgctgctattgttgccacagtcccaaactcccaatcccacccaggcacccacgcagacaggaaatgacagccgcagctgctgctggctggaccgctcgtcttcatgcctttgccttcctccatgcatgtagagtatctttattttatgtgggactgacatgttgtccccgatgaacggcaataggttttttttgcatgttcgccgactgtctgatcaaggtacgtactgatatgcatgtggccatgtgggtttaggatttaatccgaaacgaattgttttttatctataaattgcagttacatattccaacaattgattttaatacgaaccgagtgattgccaggcacacgcatccaaccccaggcggacgactggcattgctgcctgggccgagcaacgttttgcggccatcaactaaaacaagtcttagactatatacaacagcttacacatatatacttatattcaaacaccactctacgaactatacagtctacagtacaaaataatgtaatacagtgcttatatggataaactttggttgagctgctggagtcggccttaactgcatggtcttccactctttgttgtgtgtgaacgtgcagggccgatatcaaggggctggtggctccagaccccatacatccataaaactctatttgataaagaggtagaggttagaagataaggaacggggaaaaataatacagagaaataagcacccattctattagagaaaaatgacaagaaaggagaagggagaaaaatgagccttcctaccggcttgtgttgcctccatcactaatgactaatgtttttttttgaaatataggattggtaaaatataggaatagaaaaaatgtaggactgtcctaaaataaatgcatctaagattacttaactctatttattatttttcattttctctatttttaaagtcacaacaagaatccaaaaaaaaacctgctggcaacggtaactaagctgacgagagttatttaatcttcgtcgtctgacatcctatctgaattcctattgtcagtgtaatgattgtctcaaaacaacttttatactataaattctaaccttgttttttttaaaaaaaaatctagaggtgcattaattacttgttggagaacatacttgttgtcattttattgtctcttgttttttcaaatactatacagtatgaagacagtctcgcccaactttgcatgttgtatccctctatccccagatcgtatactatgcttggagataatcagaagccccaaaccacaagtgcacatccgcgtggacataggatgtatttagttaaacgtacaggaagggatcgaagtagtgaccatattttctatgatgtttagatgagaatcgcgcggggagcaagataaataccgaagcaattttttttagcgacgtgattaaaaaatcgagtgtctccaccttagaccttaaatcaaacacngcgaggggggtaaatgccggtggagacgagacggtgcttgcaacagcgcatcatgctgcctctagcgcctgcacctaacctctcgagggtgaaatgaattggccctgtctgtctgctagtctcagccacagctgctgcccacctc

SEQ ID NO: 5247 - DNA, 2380 bp, Zea mays
ccgggacacgtgactggtggactagacaggaaaatcccaagttacgacgacttccccgagacgacggcgtaacaaggggggaaaaaaggaaaggggatcgccatggcagcgtcgccgcagcagcaaggccagggcggccctggcagcggcgggtggactcccgagcagttctggtcgctgctggacaaggcggaccgccggttcgcccgggtgcgagacctgccctccttcggccgccaggagcccgacgagttcgccaaggccttccgcgcctacacccagctctggcggatgcagcaggagcaccgtcaccgtcttctcgacgcgggcctccgccgctggcaggtcggcgagatcgccgcccgcatcgcccacctctactacgcccagtaccagcgcaccgccgacaccgcgcttctctccgaggcgttcgtcttctaccacgccgtcctcgaccgcgcctacttccaggacgccgaccaccacctcgcccccgccaaacacctccgcttcctcgccaggttcctcctcgtcgcactcctgctcggcaggcgttcgcacaccgtcccgcgtctcgcctcggacatacgcacgctcttagatgactccaaaaagtccttccaggatgccgaatacaaggagtggaagcatgtcgtgcaagagatcgcgaggttcctgcgagctgactcaccatttatgaacatgaggccgctcaggtacagctatgcattcgatccgcccccggacacgcttcgtactgtgccaactactgtcaagaagcgaggtctcgtcttaagtgacaccatactttgcagctactatcctaacgaggtcaaatttacagacctctccatagatgtattcagaatggttcagtgcctcgaatgggaaccatgtggttcatttgcgctaaacgatggttacagcgcccatgatgaaagtggacaaaatcaacccaatctattgaaagatttaagagatgctgcactgcccccgaatccacttaagacaattctctatcgcccttcggtaacacatttcctaacggtcctttccacaaaatgcgaggagcttccttcaaatggtatcatgttaatatatctttcagctacaggggagatgggaacttctggattttgtcctgatactggtgaaaatgttttgagcaactttaataagtttgacatatccagtcttagtcatactagttcaaaggaaaacaaagaaccttgtctatggttaggctgccgtgaaactgaaggttcaaattgcatataccctggtgatctaatcccatttacaagaagacctctatttttggtgattgacagtagcaccagctatgcattcaagtctattcatggtactgaaaggggggagacttctgccatgctactttcaccaagttcccgatcttccgctgcgggattcagtggcgattctactcggcacagtggtagccaatttactatgttcctcacatctccattgcaagctttctgccttctgcttggcaacaatgggacagatattgacagggatgcatataacaaagctgaggagttattattattgtccctaaatgaatgggctgcgactttagttgcatcatcttcacttcattctatttgggttgaagttttaggcgacccgctcctaagaaggttacttctcaggttcatcttctgccgagcaactcattccctgttcaaaccaacaaaccataagacagagttccttccgacctgcatgcctcctttgcctgagtctgttgatgcagagagcatgctctcccaaagctgtgtgctgcgagtcgcatcattctttggcgctgccagtcagttctcatttgctgaggttaccacatggcctgatgttgactctgaggaggctgttgtcaccagttcatctggcagtgccaacaaaggtgtgcctgagacagccagagattcagacatttcaaactcatcatcatctttttgatgcgaccatggcgctaccttcgtccgcttgtgttatttactcatctgcatatgcggatccatttgtaattactggtgctcctttatgcttgatttacacatcatgcagaactgccttgcctttttgtttcctggttacttactgaattaatagtcactagaacatttttttatcccttagtttggaggtgtggaggagctgtgtgagaaagtgtggttgaagagtgttgtttcgttactgtccatggctcggtagaatgtattccctcggtcatttcggtttttctatgtatgttttctataaaaaaaaaaaaaaaatagattagatacataataaaagttatatatgtaaaacagacaaaatggcatctaatttagaacggaaggaatattatgca

SEQ ID NO: 5248 - DNA, 2414 bp, Zea mays
  misc_feature (47)..(47): n is a, c, g, or t
gtccagtctgtgaactctgctgcgtcggaagcccagactgcgggtgnggttagagtgttaggcctgttaaggctagacccatgtggcccacgtaaaacactatatagctgacatgttgggttaaccctaatctattgaataatcactttaacagaacggagggaatacttcccggcaaaacaaaatgcagagtacaccaaataataaaagctgtcatattgtggcaaaggcagcttggacagacgacacatgcaaattaggataggatacacccttgtcttgccacgggatagaaaatgcaagttaaaccatgacaaaatgaattcacaaacattcacattttgatctatccttttatgtcatacccataatatctcaagaaactaacaccatatatctcatagatatggcagatagtaacatcatcacaccattatcactaacaacggcagcagatgcatataacagtgagagagaaaaaaatgaaaaatattcataatttaacagctataccatacttctaccctgtctaaactccatacagctgcacaaaactgtacactcgcaaatctaaaggggcattaagtgtttatgcctggcttctccggcaggaattgcttcatctcctgatctgctctcccaccgacaacactagggagcccaagagagagagacaggggttcatcatctacaatatctgaaccagaaagattacgcttcgttgccaccatggatagggaaagtgagcataaaatggaggagccctcatctgccttcgatgatgccttatttaagctagtactaggttctggggaatcttcgtcgtcagatgaaagaacgtggatgaaatgatcaggtaaaggttttttaagagaggcaggatctgaagggccccgatgacaatgctgtaaaacatcgcatggattatcctgtccagccggtaagggatgtatcttggacaagcatttcataggtgtcattgcatctccaaaaatgcaagagtgtttcccataagtcttctgccttttgttggtgatgtcaaaatccaaaggacccatatctgaatttggagttgatttggtttgatcatcacatatctttgatccactcaaatgacagtgcgagggcaaaagaccatgtttattaagttctatctcatgtgagattgatctagttgcacctagttgctgcgaaaaacggaacagagtttcattctgatctgttttctccattttgttgccacctggtgttcctgtgctacctgaaatgaaaatataatgattaaacaataagcaaggataaatccagaattgatctgtagctttatcctacggaaagatgccaccacctttagcagcagccagataatcctgaatcatgtcatgacctcctgttgagattgtgggaagattagttccacaggaagcaacagaaggatgccccggtataatttgtcttgtgcctgcagtttcttcatgatgtatttcacttgcattcagacttctatcctcacgtttggactctaatacaatattacgatctaaagatgcaccagacttctcactctctgatccaagtgaaagagacagatcagatatataatcattagggcactcattcaaatctatacccaaaggctgatgtgccttaggcgaaccaatatcatgctggataacaggttcattgatttgttctaatggacaattatttgtaggaagctctagtggactacttgctttccgggcataaaaaatgccccaaaagaaaggtaaaccattccaacctgtaaaatgtcataaagaatccattaaaaggaggcaacgagcaaatcctgccacgagacagcaacattagcaaagataaacttacgttgaatcctctctggcaatttatcggatgggaaaatgagaagttcagtgccaccaatatttgctttaagagacaaatcaccaagaagcatgttatccaagagttttccatatgccctttcataactgttcaaggagacatgagacctcagctagtgtacagaggattgaaactcatgaaacagtgaaatggcgaagaaagtaatacctttcaacatctttagcaaagaaaaaaagagcaatattatcttcagttggatttacttcattaaattgcagtggccttgaggaatgccgtgggacttctgctagctgaattttgtcaggtaattgttcacctaccttccacgtactttggatgaggcgcaagtagacaagtaagcttgaaacccatcgaacatttcaggggagtttccatgtcctgaaacctcaaacccaccctgccagatgtaagactgcggacgcgtgggctgaaataaaaggaattcacagttaaaactcttaactagtaaatggaagtaaagggagaagaggagggtcgtactg

SEQ ID NO: 5249 - DNA, 2841 bp, Zea mays
gcagcggcatatttcctccaggccaggcagccccaccgggcaccgggccaccacaccacgtgacatccgtttcgtacggcctcccccaaaaatctcaccgtctctctctcctaacgaagaggagagggggcagaagaaaacctcgcgcgggggaggcgcgagaggaatcgcgggggccggaggagcagcggccggtggaggtggcgcgcgcggtggccgtccgagatggagtacatatcccctgagagaaatctggaggggacttgtggagatcctgggccgttatttgccgaccaaggtggcagcttgttggaccacttgggttatcaagggggaggaattccacaacatgagtctccaacactggatcatggacttttggttgatccagctggtgcaattccgtatttatctacagattctccgcccttcatgaatgatcaaatcacttgcaatgttataaaatctgcttcagctagtccagaatcttgtacaaaacaacctcaagaacctcttaatgtagaatctgatgtacagaatgacgcagctgaacaaaatgttcacaatagtaactctgaagaacagatcacttctctgggctgtgatgtacagcagaacacagaagtaattgatgaactgttgcctccaaagcttcctgaaagcagtggtaatgatatatcaaactttcaaccggaaactacatattctgatgcctaccatggtgactctttgttaactgaaaatagttgtaatagttatcagcttaacaatagtggtgctcctgctgctgatattccaaactctcctgcacttcagatggaaaatgaggagatgggaaagttacatgagacttctcacaatgaaaacagtgggtcagaggatgatcaaatgaatggtaggaagccttgccccattagtggtcgagacaatgagaagtttaacacttcagctgtacctccctcttgggaacagacaaaacaaaaaaatcctggtaccagaaatggaagttcaactccagacgatcaatttgattctcctccagacaggtttgcaagattggaaagggacacaccatctccagatgggagagtatcccctgaaaggtttgcaagactggaaagggataccccacctccagacggggatatatctcgtccaggtgaaagttcacatgtccattctgagacgatggagatggagccagaatatcgcgccaatgatgataccccacctccagacgggaggatgtctcctccagttgaaagttcacatgtccattctaagaagatggagtcacaacaccgtgccaaagatgttggtgagttagctcgttttgaaagcccacaggtaagacatcggtcccgatcttctgaaaaacatgaccccagccgcaaaagaacctcttcaggggagttgtctccacatgcgcgtcagaattctcctgtagaaaggaaaagacggagagagtctcgacatggtgatgggtcacctcgacagagatctgcatctccccgaagaagatctacaccccctcgaagaagatctatatcccctcgaagatcctcacacaagaggagggaatcaccaagaaggggagactcacctaggaggaggcactcacctaggaggagggagtcaccaaggaagagagactcaccaaggaggagagactcaccaaggaggagggattcaccaaagaggaggagggactccccaaggaggagggataggtcaaaatcaaggtcaccttcaagaaaacatgacacttctagacataaaaaagaacatgacagatctcggtccaggtctccccactcaagggatcatcacagacgatctccaaggcattcaccaagacgcagatcacccccagccagtcatcgccatcattcaccaagaagacattggtcaccacctgccaacaggaagactggattgggtaagcctggaaagaatctctttattgcaggatttagctatgccaccactgagcgagatttggagaagaaattttgcaagtttggacgtgtaacaagtgcacgtgttgttcgtgataaacgaactggagattcccgtggctttggattcttatccttggataaggatgaggatgctgatgcagcaatccgtgcttgtgacgagactgagtggaatggaaggatcattcttgtggagaagtcaaaagcacctgcatggtgaatcttccgctttgggggcgcacacgccattgttcgagagggatttcattgcttcacctttcacagattttaccattcagaaaaaaagaaactaccggtatgacatactcggtacatgtcaaagttcacccgaacctggcttttgatgctgtactaggagtaagagtattaaataatgcacttccttgctgatagttgttgaaagaataagatgtaacgttgcaccttagcttgtttcagggccctgctgctgataagagggacttacgacttagtggtacttttagtgtctgcaacctctacacgtgaaatgtgatacgtgcctgttcgtgagctgtcagttctcttcttcaccttcatctcgcgcccactgaatactgatggcatgaacggattccgggagactcaagctttatggtgttgttgcgactcaagggttatgttagcagttcaataatctgcatattagcttttcaatgttgtgcatcctctgaatgagggtttggaaaatgtcctatatagtttgtgttttggattccagatgttgtttaattatggtcacgacacgatacctatgccccatctgttgactgttggtgatgttttttttcctgatgacatgtcttttcatcctgtgttcttg

SEQ ID NO: 5250 - DNA, 2414 bp, Zea mays
cctcgagccggccgggaatatattaggggtccctcgagtccctcgcggccggccgttcctgtaccctgcacctgccttttactccattcccctcggtgcgccgccgccagtccgccccgccccgccccgcccagcagacagcgcagccatgccgctccacctccacctgctgtcgtccccggccaccgctgccaagctcgcggcaggtctgcgcgcggcgcctctccgccggtgccacagcttggccccggcgccgcgccacacggatcgcgtggcccttgcgtcgtccctctcggcggtggcgcggtctgctggccccgccgtggcagcggcgcagaccaagcccagcgtttcaggaaagaaacaagtattgatatcgttgtcggataaaacggacttggcttatcttggcaatggtcttcagggtttggggtattccatcgtttccactggtggaacagcatccagcctggaagcagcaggagtcagtgtaacaaaagttgaagaaatcacacatttccctgaaatgcttgatggacgagtgaaaacattgcacccaagtatacatggtggtattcttgccaggagagaccaggagcatcatttgaaggcactaaaagatcatggaattgggacatttgatgtggttgtggtgaatttgtatcccttttatgacaaagtcacctctggtaacatctcttttgaggatggcattgaaaatattgatattggtgggcccacgatgatcagagctgcagccaagaaccataaggatgttcttattgtggtggatcataatgattatcctgctttactggagtaccttaaaggaaagcgagacgatcagcagttccccaggatgttggcatggaaagccatgcagcatgtcgcctcttatgattctgcagtgtcagaatggttgtggaagcaatcaaataaaggagagatgttccccccaagctttactgtgccactggagctgaagtctacactccggtatggcgaaaatcctcatcagagtgctgcattctatgctgacaagagcctttctcttgtcggtgctggtggtattgccactgctattcaacaccatggaaaggaaatgtcttacaacaactacttggatgcggatgctgcatggaactgtgtatcggagtttgatagtcctacttgtgttgtggtgaagcacacaaatccatgtggtgttgcctcacgaaaggatattcttgaagcttacaggttagctgtaaggggagatgctgtcagtgcatttggtgggatagttgcattcaacacgactattgacgaggatcttgcgaaggaaattcgtgagttcaggagtcctacagatggtgagacgcggatgttctatgagatagtggttgctcccggctatacggagaagggtcttgaggttctcagaggcaagtccaaggcactgaggatactcgaggcgaagagaagtggaaaagggatgctttcacttaggcaggtgagtggtgggtggttagctcaggagtctgatgatctaacccctgaagagatcacctttaccacaaagtctgagaggtctccgcaagaaaacgagcttgccgatgccaaatttgcctggctttgcgcaaaacatgtcaagagcaacgcaattgtgatagccaagaacaactgcatgctgggaatgggcagtggtcagccgaacaggcgagagagcgttcgaatcgccttcaggaaggcaggagaggaggccaagggagccgcattggccagcgacgccttctttccctttgcctggaatgatgccgtcgaggaggcgtgccagaacggcatcggcatcatcgcccagccaggaggcagtaagaaggacgaggacgccgtcgcgtgctgcaacaagtatggtgtgtcgctcgtcctcaccggcgtcaggcacttcaagcattagccgtcatgccccatggctggtcatcttagcttagggagttacggaaaaaaaaacaagcttcgaaggctgcagcttgtggagctgccctgatgtttagctttctgcaaagtgcaaaactgcaaattttggtttctgtagggcgtaggctttggtgggtgagctcgtggggaaggtaatgtttctcctggagtcgaataagctgatgggtgtaccgcgagtgacaattgaacccaacctaaggacttgcaggttggtacttttatctgtcaaaatcagccgtgcgcctatgcaccaggagaatcatcgatgtgacctacaatcttcggactacaaaccattgaaaaataaaaagagaaaaggtgcctgggaatttctgtgttcacaaatatatgagcgtttgcagttctgcattatgctgcctggtctagtgcgtggtaagccggccccaaggaggatcctgtcggtagcaatctctgca

SEQ ID NO: 5251 - DNA, 1634 bp, Zea mays
cgcttcaactggacttgtgtatatacagcatacatcggaagatccgcggctaatttctcaggtctcaatcaagcgataggagcgtggtttcgcgtcgagtgctcactcatctcaagcgtcaccgtcgaccgtggagcaccaaatcaacccgtgagacggggcagattagattcttcccatccaaggggcggtcgcaatgatgacagatgataaaggcgaggttcgcgtcgtcagtattaacgataaaaaaaacaccggcgcatcagaatgtccaaagtaaaactactactccttttttcattatttatcttcctaagactgccccggttggaccgaaccaaaccaaaccaccacctcgtatcgtctgtgcccaccgtgctagaataatagtatcgcactgcacgatgactatttccttttactttaagttacaaaaccattggatttcttacattacaaattaatttagttctaaataaaaataaatcatttttgatttatgatttattcgattagagatggtgtaattaatttagttctaaataaaaataaatcatttttgatttaggatttattcgattagagatggatgaaatgagatagaagtggattaaatcttcttctatttaaaatagaaggagatttaacctcctcatatcccaccctgttcgaaggagcccaagcccaaggggcgcacgcgcacgtgggttgagacgagtgatcactggccacatccggacccaaaaatatcacggggtcgggggaggcccattgggtacccaccggcccggggggaagcagagggagagcagtcaccaaaccaaaaccgctctcgagtctccatccattctctccgctcatccgcagctctcgagtctccagctctagctagccttagcctcgtccaagggacgaaggggccaccatgagcgtggtgatcctggacggctccacggtgcgcggcttcgtggcggacgaggcggccttcgcgcgcagcctggacgcgcggttcgccgcgctggacgccaacggcgacggcgtgctgtcccgcgccgagctccggcgcgcgctcgagtccttccgcctcctcgacggcggcggcttcgggtccgcccagccggcgccgctccccgccgaggtcgccgcgctctacgacgccgtcttcgagcagttcgacgccgaccacagcggcgccgtcgaccgcgccgagttccacgacgagatgcgccgcatcatgctcgccgtcgccgacgggctcggctcccagccgctccaggtcgccgtggacgacgagggcgggagcttcctgctcgaggcagccgagcacgaggccgctgggatcgccgccaagatcgaagccaaccgcaaggcggaggcggaggcggaggcggccaagtgacgacgtgtccctcgtgcgggccctgcgcttgattttctgggtgtttgctactacgtactagtactacttacctggcggccgatgtgccgccgcacgtgtacggtatactacgtaactagaagcggccagcaccagctactcaaatcactgctgatgctacttgtgaacggaataaaacctgtcaatcattttagtggtcttgcttgcataaaacacctcgacctcctccgggctt

SEQ ID NO: 5252 - DNA, 2199 bp, Zea mays
gggtacctcgaggccggccgggcccgtgttggcctggcagcacgacctcatcacggcacggcgtccttaagctcatcggccgccccgcccccgcctgcgacccgcgatctccgcgaccgcaagcagctcggcaggcaggcctccaccgctccaccacctccactcggtctacgtgctccgtcaccaaacccacccgggccaacgccgaagcaaccccccctccgtcctccccagatccggcgccgcctccgccctcacttacactagcacgcacggcggacacgtcgcctcccccgcgcgatctgatgcaggcgcacgcggtggccagcggcgatgcggtggaagcttaactcctccgtctacaagcgcgtgccgtccagggaaaccgccatggaacccgacgtcgagacgccaatgagaatgacggacggcggcggcagcggcgcggggccgtcgtggcgcatgtcgttgccgcatgtctgtgtcgccacgctcacctcgttcctctttggataccactccggggtggtgaacgagcccttggaggtcatctccgctgaccttggcttcgccggcaacactcttgctgaagggctcgtggtgagtatctgtttgggaggagcttttgttgggtgcctcttcagcggctccatcgcagatggtattgggcgacgccgtgcgttccagctcagtgcgctgcctatgattattggtgctgccataagtgctctctccaatagtttggagggtatgctccttggaagatttttggtaggaacagggatgggattgggtccaccagtagcttcactttatataacggaggtttctccttctacagtgaggggtacatatggtagctttgttcagattgcaacctgccttggaattatagtatcactactcattggtacacctgtcaaagatattgatagatggtggagagtgtgtttctgggttgccgttatcccagcaactttacaagctctcggtatggagttttgtgctgagagccctcagtggctttataagtgtggaaaaataagtgaagcagagatgcaatttgaaaagcttttaggtccccttcatgtaaaatctgccatggcagaactttctagatatgaaagagtagatgatggagaaagtgtcaagtactcagagttgttctatggtcgccacttcaatgttgtttttattggcacaacgctctttgctttacaacagttatccggcataaattctgtgttctatttctcatcaactgtattcagaagtgtgggggtgccctctaaccttgccaacatatgcatggggatttctaatctatcaggatcaattgtagcaatgcttctaatggacaagctaggtagaaaagtgcttctttcagggagttttcttgggatggcttttgcaatggggcttcaggctgttggagcaaaccgtcagtatcttggttctgcatgtgtatatctttcagttggtggcattctgttgtttgtcttgtcattttcactaggagcaggccctgtcccaggacttcttttgcctgagattttccctaataaaatccgagctaaggctatggctctctgcatgtctgtacattggatcgtgaacttctttgttagtttgatgttcttgcgtcttctggagcaacttggtccacagcttctctacacaatattttcgtcagtctgtgtggtagcctcaatatttgtgaggcgccatgtgttggagacgaagggaaagactttacaagagatagaggtttcactcctgcaaccacaataaaggtacatatttgacgtggctggaaccttgggcaggctgtttgctgaacagaaacaagctggccctgcagaagctgattcctgaagtcatcggcaacgccctacaaatggtctcagggaagttccagatatgcgcctgcgacagctagggcggtgtttccatagagcatcatgtactgaagttatgcctgtatcgcccgccctagataggatattttcatacttgtgttgtcatctgttctatctatgagtcgtaatatcagaaaaaaaaggtactactgttttaccgttgatgagcacagttgaaaaaaggaactatcatcttcattttacatgtatgtactcagtaaccatactccgaataataacactgcatggagattccttgttagtaaaaaaaaaaaaaaaa

SEQ ID NO: 5253 - DNA, 4774 bp, Zea mays
  misc_feature (2923)..(2923): n is a, c, g, or t
gcctgcagagctgcgctgactcctggagatccatacatgccattgccaaacgaggagatcattagtaaggttcaaaagcaggtaggtttgtaaatagcttctgtttcggtcaaatttctgctgttccctttacacatagctgagcaagaccccatttcaatgcacttaaaaagagagagatttcttctgcttatgttattttgtattcttccaaagctcacctcagtaataaacacatgtaattttcccacaggttgtagaactgttcccatcttcccggggcttggaagttacatggtccagtgtggtaaagatcggacaatcgctgtaccgtgaggctcctggaaacgacccattcaggcctgatcagaagacgcccgttaaaaacttcttcctctctggatcttacacgaaacaggtattgttgtacatcaaaaacatcgacctagctacagccatcaacaggcccagaaaactaatgtctgaatgccttgagtttgttttaaccaatggctcagaaaaccatcagaaacaaccatttcaatttcatttcaatttcatggcgtctgaacaccttggaatgttttttttcctcctatcttgcaacatgcaaacatcggtaggacatggtacattggtcttatttgtgctgtacacgaaacaggactacattgacagcatggaaggagcaactctctccggcaggcgaacgtcggcctacatctgcggtgccggggaggagctgctggccctccgaaagaagctactcatcgacgacggcgagaaggcgctggggaacgttcaagtcctgcaggctagctgaacaacccctcctgcactgcagagaagcttggatctttccaaccacacatacatgctggaatggacaaaccaaccaaccattggcttttctcgcttcagggtgctggcgattcccgcagcgacctcctgtgtatcgtatccaatttgagcattagatctgccccccctgcaggcgtttctttcctatccctgatccgagaagcagggtgtagtctaggtggctggcatacgggattacatcaggcagtgtgtaagttcagctggaactcgattggtaattgggatggatgattgatgatatatatatagcacacactgttcttgcgtcttgcaagaaaatatagcaagcgatgatccggcgacacttgctgggagactgtaccaacgatcttacttcattttggccattgtgttttttttttttttacaaaatagcagcatcctgtatcaactcgagctctcgtgctaaaccttttcgtttcatatgaaaaatatttcgttatcgttaggcttaggccatgcgcatttgagctatggtttatggaaagcttgccggccttgacgctggaaggagaaaccagtcagtctccggcgctgcccctcccgccgtggccggcgacgggtggaggcagtatgtggagcgagagacagtgggcagccggagccggcgtgtccctctgaaggcctcacgacctgccggcttgtgatggccacgagcgcgtgcgcgtgagcgtcagcgtccgacctccagtggtccgtgtttccccgagcaagagcgaacagcagtttggcggcggctgatggcaccaagcgcagccgccggaccgccgtccctggcccggccatcgacatcgagtagcagccacctgcggcgcgccggcagcgccctccagcccgtctccgtcccgcgcgccttggtgcaggggcggaggcgcctcacgggcgccgtccgagccgcgccggacgcgccgccggtggtcagggctgccgtcagcgccgtcaccgagctcctcagagccctctccccgaacaaggcgctcaggtaactaacccagcatctcacactcgtcaaccccatcagtcatccatccgctctggaatatggatccccgtggcgttctgtgctcttgcggtcggctgtgcaggggcgctgctacccagcagcagcagggcgaggagccggatccggacccgacctgcggcagcgtcgaggacgtgctcgccgtgctccgagacgattaccggcgcgcctacttcctcaccggtacgggctccttgcacctcgctgcgttcttgcgtcagtgatgttcgggtcacgctcgtggcgctggcgcttgctagacactgtggtggacaggtggagctactgcctaaacctgacaccggccgaaccgcgacggcgacgttgatgcatgcgcgcgcgcgcgcgcactcagcaatcagcatggcatggatcgttcaaaggacatttttttttaccaaggaaatggtgtgggattgcaggggatttcactccgggaatatacaccgaagactgcttgttcgaggacccgacgatcaagttccgcggtacgtaatttaaaacatctcttttgttgatgaacatttgttagcctgtactgtctgagagaagaagaagaaggaaaaaaaaaaaccgagctgtgacaatgagtgcgtgcgtgcgttcttgctcctcgcacaggactctccaggtactcccagaacctgggtctgctggtgcccttcttcgacagcccttcgctcgagctagagaacattgagaaggtaggaactagtcgaccggcggcgattcgttcgcagtgacatgacatcagtttctgactggaaaatgcgcgtccatatgaccatatcagggttcgagggccgaaacgaagttcgtcaaggcgacatggaaactaaggttcatcttcaagctccaaaaggcacacgtaatttttttttcttcctcctccctacactacacagcagtgtttctgaacggaacaggactgaccgtcgtttcaggacgtatctgaggcttccatggaggccgctggtcgcgatcggagggagcacgacgtatgatctggatggagatttnaaggtagccgtccgggaaatctccaaactgtgggagtttttttttgtatgtacgtttgatgcggatttgaaatgttcttatgtttggatcgatcgtgtttgttcaggttactcggcactccgagagctgggacgtctctgcgcttcaggccatcgctcagatcttcgtctcggccccggaggagaagctggaaggcagctgaggctgaggcagagcatgcaatgtacagcgccacgcagacgcaggatcagtgatctgaatccgtgatgagcaggtgtccaaagccgtctgtcagagctccgctggtcttctctgtgcaaacaaactgtaccctctctgttccaggttataaacattcgaataattttgctacttacctagatatatgttacgtatatagatatatagtaaagggcggttattatgacacaaatttgtagggtgtaggtacaggttttgaatttgacatttgatgaacactatataaaaaccgactctcctatattccaaacgaacatcctcttttgaatcagatagacccatcggacccatccttctcgccacgagccacactcttctgtgcttaccaaaatgggctggccggttcctggacctggcccgtcttgtgccgatcctcctgaagcttctccggcattttccgtccctaaaatcccctaacctacttgtactggaaactaccctattattactatattcttttcccatcatcaaatcacagtccaacattggtacatccaattatagataaaaaaaaggcggtactgcatggggcctgcggtatttattaattaaatgtgtatttgctgattttacatgagacgatatgtacaggctgcattacagagtgtttattcattgtctgacctcctccgctatttcttgctttattttgaagcagataagaagtatctcttttttaaacaatgtcagccacccttgtactgtagatggcacgtttttaaatattccattcatttctacacttccagatgcaccacatcatgaccatcactgtttccactttctattttttttgtcaagttattgtacagtggatcttatcatagtgtgaatgtccgatgctctcggcagtgtaaatctaattgtctgcagtctaccagcatcttcttgtgaagttgcacttgaggaagaggtggataattgtttcttctttttgcaagatataatttcacatgtgtacgagtccatctccataatttttcttctaagcattgcccttgtgttgagacgattgtgtagaagcaaccaaaacaacaccttctgcttgggttgacattttgatttccactgcaaggtgaacgttacggtgcaagtggtgcttttgttatatgtttgtaaactttctgagacgaatatcttggagtgtcccatatatttgaataggtaacccataaaattatgcataccataaatgtaaactttattatatgtgttgtttcggatcaaactgagtatgcaaagggagaagtccacttgccttgcttatagaagagtcgagattcttccatggaatagattctgattctcaactactggatcaatttctaaacatcacaaaaataaataggaagaaacaaacaccactcaataacatacaacattcaccatagattaaactaaaaagaaaatataacgaaaagagcatctgttgttcaaacatcacaaacaatgattataacaaaaaaggtgcgcttttgtaaaaaggtttggtttatattttataatactagacataaacatgaaaataccttagttagaaatatataaacatcaggtgaaccatattaatcttttataaaagcacatata

SEQ ID NO: 5254 - DNA, 1595 bp, Zea mays
tacctcgaggccggccgggattcgtcttctatgagaagtcagagccagctcccaacaacaaacctcatgggtatacatgcacagatgccttcgtctggaatgggtctgacctcacctagatatccttctaggatgtacccagacaacagattatatgggcagtatggtcagtatgggaacacactgaagggtggccttggttttggatcaaacatgtatagctcgagaaacaatgggaggtggggagttgtggataccaaatacaagcccagagggcgtgcaccttttggttttagtggtgagaaccaagatggctttaccgagctgaacagaggaccaaggtctggtggtttcaagcaccaaaaacaattcggtcctactgtaactattgctgtgaagggccaagccctcccttcagtggggaaacagaacagtactcttccagacaaaggccaatttaaccaggaagggtttcctttaacctacaaggatgcaaagttctttgttatcaaatcatatagtgaggatgatgtgcacaagagtataaaatacaatgtgtgggctagcactcctaatggaaataagaagctggatgctgggtaccgagaggctcaggagaaatccagtgactgcccggtgttcttgtttttctctgtgaacacaagtggtcagtttgttggtgttgctgaaatggttggtcctgtcgactttgataagactgtggagtattggcaacaagacaagtggaatggttgttttccactcaagtggcacatagtcaaggatgtgcccaacaacactttgaagcatattacactggataacaatgataataagcctgtgacaaacagccgtgacacacaagaggttaagctggaacaaggtcttgaaatgttgaagattttcaaagaacatgttactaaaacgtcaattttggatgattttggtttttacgagaatcgccaaaagttgatgcaggaaaagagggcgaatcagcaactgcttcaaggccaggggggcgatgtttctcaagagaaagacaaggatgcgactaatggcaaaccagggtcacagaaacaggcaacgagcaaggaaggcactcctgctgaggtggcggcggatgcctccaaaccagtagctgaaagtggaatatcaaatgacaactaagcatcatgcatactggtcggcaccataccggtgcaaatgctgcaggttttgcggtatctgcaaatcaaaacctattgattctgcctgaattatggacttctttcggtactggagttcgtgagatggggctcatcatgggagtgaatcagattttacttattgtcgctttgctagttgtgtgactggtttttggtgtcttggaacccgtgttaggcttcttacatacccctgtgacgacaccgagtttgttgtaacccttgttttttttgcctttttgttttagttctatcattgttaacgaagcagcctatttcctatactttgaacaacattaaggtagttttttttgcatgttgcggtactgtggagagtaataagacaaaaagactctaggtttaaaccaaaaaaaaaaaaaaaggcggccgctc

SEQ ID NO: 5255 - DNA, 800 bp, Zea mays
gcaccagtcaacatcagaggggtaaaaggcaaaggccaagctctctaatggagcgccggctgctcgccccccccgtctcaatgcgtgataagcgaaacgctgcgcgtggccaacctgatcagcggggtgttcaggcgtgcgaacaccgacatccacttcaaaggctacgtgatcccaaagggctgcaagatcttcgcgtcgttccgagccgtgcaccttagcctggaccactacgagaacgcccggaccttcgacccttggagatggcagcagggcaagagcaagctgcagagcgcggaaggggccagtctgttcacgccgttcggcggcgggccgcggctgtgcccgggctacgagctcgcccgggtggtggtttccgtcttcctccaccacctcgtcacgcgctttagctgggaggaagccgaggaggacaggattgtcttcttccccaccacgcggaccctcaagggataccccatcatcctacggcggcgaccggattgcgatgatctctgacctcatggctatgttctccccccttatcttcttcggatcaaggccgaaggctaagcattagatagagtaaggtggatgtcgtggctagtaggtgcatggtggtttctgccactcactcactcactcactctgttgtctgtttgttcctgttcctctctgttttctcttgctctgtaacctggacctggtacgagtcagcagccagcagcaaactcgcgttttgcctgtaaaatctaaaatctgatatgagatgcagatgcccccgcgactgagacggaaaaaaa

SEQ ID NO: 5256 - DNA, 1836 bp, Zea mays
  misc_feature (863)..(863): n is a, c, g, or t
tttgtttctatatattcattaaaaaacagtagagttgttcgcttcatattaaagtcaattgttcgaattattgtagctgctacaattgatagagacaaaacaacgtaaaaacagccgataaagattaaaaacaaatgaacaggctgagctttattctacaaaaactttctcaaacggtctaaattcacaaaccctggattcatcgaaacaatgcatctaagtgccatattcaccatttttgtgccgcgcctcaattgaagtttcatcaaagttgattacacaaatgtgttggtttgttttcttcttcactgaatcactggtggccggcctcgcccctcgcccccaccacggtccacagacagcaatccgcccgaaccatcatcaatatcgcagcgcaataataactcctgtgaatcaccggcagatgcgtgcatcattgtgggctggaactgcactctgctgaaacagaacgctcttggcgaaccttccctctccatagtataatctgttcatctttaaataatataggaatgcatggaaccaaatctcagttttgtaagtggtggcgaattcaatcctctgttcctcaactcttttgtttcctcgaaagtcaacccttcagcaacgttttgcacgagcttaggatagataggagctaacggtttccacagcatcaatggtacgccaggccttttctgggggtcatagttccgaccgcggtacagtataatgatgtttatgctgcgggatacgactttgccgcctgttttatccgtattatgacctcgagatggaagcaaatgttgtccatgtcgagcgttggcactcccagacatttgatcctcacagcctctgcacgtttnccaatggttgtggatgtcatcaagcatattgtgtgttaccccacctttccccaaattgatctgccgtgagcaatcactgtgccggtacctctccaccagcgccgccacctcctcctccgacagaggttccccgagaacctcctcccggctcctctcgtcgccactagcatcatcgccgacgcgtgccgcggctgtgccgtcccatgggcggtcgaggcggccggggccgaagggcgagaaccgggtgggctcgcggaaaccgatgggcctccatgtcgggtctgtctccgagtacgagtaccggaagtcaaagggaaggtcggagtgcgcaggctcatcgggcctgatcttgcccgccagggccttgggcttcggcggcggcgtcgatggcgcccgaggtgggagcttaggaacccgcgtgaacggagggtcgtcgtcgtcggggtcaaaggaggatgaagaggagcgcaggaggcggcctgccagggcctgggcgtcctgagcggggcgccgccatgggagaagcttacgaggaagaagcatctttttgatgagcttattgcaaaaatgagactaccaatatggccgttttcacctttgttcatcaacgttgcactctttcagatatgggactgagacacactcacacacttgccttaagcccttaacgccgctcgtaatctgctggaccggagctggagttcctcatttgcccttggttctctctcgctcgagctctctctctgtcttcgccagcgaccgctcctcctgctcctctgtaggtcacggtcaccccagtccccagccaaggcagccgctcaggcctgttgccctgttgagctgatagtcaaggccactgttctgagaatatgcaactgcttatcgccggatgcctggatggatgaaagctgctgctgcagtagcagccgaacggggctggcggagaacgggacttcaggctggtggagagcgg

SEQ ID NO: 5257 - DNA, 1974 bp, Zea mays
gagaatttgtggaggctagaggacagtggttcagatgactggatggtcgttagtttcgagataaccttcccccagctgctggagatggcaagagacttgggtctcgacgtgccctgcgacgagccatccctgctagctatctatgcaaggagagacgcaaagctcgcaagaatccctaaagaattactgcacgcttcaccgacaactctgcttctgagcatagagggaatgccgggcttagactgggagagactactgaaactccagtgctccgatggttcgttcatgtcatcgcctgcacccacagcctacgctctcatgcagaccggcgacacgaaatgcctcgagttcctcgatggaatcgtcagcaagtttagcgggggagtgccctttacctaccctgtggatctgttcgagcacttatgggtagtggacaggatagagcggctgggcatagggaggcacttcacaggtgaaatcaaggagtgcctagaatacgtacacaggtactggggtgacgaaggcttgcccgccacgagggaccgtccggtctcagaatgtcgatgacacggccaatggggttccgtcttctccgactgcatggctacgatgtctctccttgcatgcatatgcagctgtgtttaagcacttcgagcaggacggggcgttctactgctacccagggcagtcgaacaaatccgtgactgctatgtacaacctctaccgcgcttctcaggtggcctttccaggcgaggatgagctccgacgcgctgaggcatacagccgtgagttcctctgccgcagacgagcctccggggagctcaaagacaagtgggtcatccccaaggacttgcctggcgaggtcgcttacgcactggacgtgccgtggaaagctagcctgccgcgcatcgagacgaggatgtatctggagcagtacggtggtgccgatgacgtgtggattgggaaggtcctgtacaggatgtctctcgtcaacaacgagctcctcctccggacagctcaagccgacttcagaagtttccagagacaatgcaagctcgagtggcatggcctcagaaaatgggccagcaggagaaacctccaagcatacggcgtgacgtcgaacagcacgctgcgatcctacttcttagccgcagccagcatctttgagccagacagagcgacagagcgtctgggatgggctcgcacggcggtgctcgccgaggccgtctcctcctgcctccgagacggtcgttgtagccgtgccgacggcatgctgagggaactgaccagcggcatccacctacgcaacgacgataatccggcagccagcttggtgcatgctctccatgagctcattggcctccttgcattcgacaatgcttcctacaacagccttcttgatgcctggaagcaatggctcgccatgtggaccgcccagggacacgaagggagcgtagcgctgctgctggttcgcacagtggagatatgctccggccggaggcgtagcgcctctgccaccgacgatggccaagcacacagcctctccgagtactcccagctcgagcagctcacgtcctcggtatgcagcaagcttgctgcagcaggcgccggagacggagacgacctttccccggcaagtgtggaggacgcagcagatcgcctccgtgtggatctggagatgcagacgttggctcggtgcgttctccggagccgcagcagtatcgacgcagtgaccaggcagacgtttctccatgtcgcgaggagcttctattacgtcgctcattgctcagctcgaacggttgatgcccacatctccaaggtcttgttcgaggatgtcgtgtagccaccgtttgggcctcgttttgtatctttaaagcagtgtttggttccacccaggtttagttccggtcaaatcaaatgtttgaatgataattatatgtattaaatatagtctaattataaaactaattagat

SEQ ID NO: 5258 - DNA, 3358 bp, Zea mays
  misc_feature (625)..(625): n is a, c, g, or t
ttggctctggattgtcatagaagcaaatcttttgttagtaactctgttcatttaaatggtcgtttagcttgtttaaacatcatgtaaacgctacactgtgttttttccatttagtgtattttatcccttttatttggtagtgtagcccatttaacgatctatttagtttgaataacgactaaaccgataggtgaccgactgtttaccattcagcatttaagaaaatatttgttagtagtgtggtagcttactggtagtttaccaggtaggcgtaaaagggaggctagattatgaagtgtcataatttgggtctcgttagggaggttttgggtctattgtttgtgctatataaggggcatttaccttgcacctagattgaagcatagcgccctagtgtgttgttgcctactagtagcaattgtgataagtgatgaaaccctaccctaggaaggtgtacaccttttcagagtttgattaagctgttatcacaggtgtgcaccctcacatgatcagaatggatctcatttgaagatgatttatgaggttgatgttaacctgctcatgaaatttatttaatggtttaagatcttttacttagtatagtaaacatgttattctaaaaaanccttggcaactaaaaatgctaactgcattagccctatgttagttattacctcttgttatcaaccttgcatattaaattacttatgcacttgttgagtatgacatatacacataacccttgtaatctctaaataaaaaaagggttggatgctagttagatgttgtgtcgtgtcgtagaccttcctatggcttggtggaatcgctctatcgttttcatctgacgcccgtttggatcttggaattgaatttcattctaataatagtaatttatgcatatatcaattaagctaattcagttttatacaaaatatatttgtatactattattaacaagatatcggagatatttatgtgctgtatttttattatagagaagtgatccgaaaagtgtcctataagttgtagattagaaataaattctactgatacataaaataatttcacatcctccatctcatgaatttgagatagtcctatatctgaactttgaaagtagtggaatgttaaattccaagctaaatagtttactttattaagtaaattctaattcctgcaaaatgaatggattcaaacgccccgtgatagtaatgtcgaacactacattttatgtttccaatgaacgttgaggcttctaataatatattgtcacttatttatttcatatattgtattacctctgttcttaaatatattgacattattattattttttttaaaaaaatttgaccactcgtcttattcaacaaaaaaatgtgaaatgttatttattttattataatttgttttatcacttatggtagtctgagtgtgatttaaattttggattttcgaataagacaagaataagacgaatggtcaaagttttttttaaaaagtcaacgacgtcgtatatttaaaaacggagggagtatttggtttatagtaaacatgtttttttgggcatcacaagtttgaactggtgtgtctctgctagttttgtcagcactgctgctgctgggaaggtagggtcgatcgaggtgcagcagcacttgacttgtccgtcccctctccaatcacagttctgtacgtatatccatctcagcaccactcgtttatatatgcacctggggatcaataatcatttgtctcttccataagcgtagacctaccacagggctgggccaaccagtcccgatcgatcagccagcatggcgtcctcctccaaagggtcgctgccatgcgtgctcctcctcctcgctgtcttccaccacggctgctcgtcggcgagggcccacagacgtgccggcgacatggagaggagcatgagcaccgacgacagctcgatgatagagcggttccagcggtggaaggcggcgtacaacaagtcctacgccacggtcgccgaggagcggcggcggttccgggtgtacgcgcgcaacatggcgtacatcgaggccaccaacgccgaggccgaggcggcggggctcacgtacgagctcggcgagacggcctacaccgacctcaccaaccaggagttcatggccatgtacacggcgcccgcgccggcgcagctgcccgcggacgagtcggtgatcaccacgcgcgcggggccggttgacgccgtcgggggcgcgccgggccagctgccggtgtacgtgaacctgtccacctccgcgccggcgagcgtggactggcgagccagcggcgccgtgacgccggtgaagaaccaaggccgatgtggtacgcacaatccgttaccgacaccatcatcattccgcgcgtccttcctggcacctgtcatttgccaccagctgttgctcttgcctgtcccacatgcatgcatgcttgtcactgcgcaaaacgcacatgcttttgtcctggatggacgggtgacgggatcggatcgtgcacgcagggtcatgctgggccttctcgacggtggcggtggtcgaaggcatctaccagatccggacggggaagctggtgtccctgtcggagcaggagctggtggactgcgacacgctggacgacggctgcgacggcggcatcagctaccgcgctctgcggtggatcgcctccaacggcggcatcaccacggagaccgactacccgtacacgggcaccacggacgcctgcaacagggccaagctctcccacaacgcggtcagcatcgccgggctccggcgcgttgccacccggagcgaggcgtcgctggccaacgccgtggcggggcagcccgtggccgtgtccatcgaggccggcggcgacaacttccagcactacaagaagggagtgtacaacgggccctgcgggaccaacctcaaccacggcgtcaccgtcgtcggctacggccaggaggcggccggcggcgacaggtactggatcgtcaagaactcatgggggcaggggtggggcgacgacggatacatcaggatgaagaaagacgtcgccggcaagccggaggggctctgcggcatcgccatccgcccgtcctatccactaatgtgacatggtgtggtgtacatctgttttcgttttaattatcattttattttattaaacaataaataagtagtcaacatatggatcgactcaaacttttgcagttacgtgtaccagtacacttgttgtaaataataatccatggcatctcgcgtgtaaactttattctggtgcgaaaacgacttcttcaaatgaaggtttgtacgtgtaaaattttgtggtcactatcaagcaaaacaatcgtcatttactc

SEQ ID NO: 5259 - DNA, 1740 bp, Zea mays
acgttcccactttattgtgtttaacgcgtccgtccggaacccagaaagatcgcactacccggcgctcgcgcggctttctttcccaactccgacgaaggctagctacaccacctggtgcgggctcgtctccatcgcccgccacccgctccgtcgtcgtcgtccccgccgcgccgatcccgaatcgaatggggagcctggcgtccgagaggaaggtggtcgggtgggccgccagggacgccaccggacacctctccccctactcctacaccctcaggaacacaggccctgaagatgtggtggtgaaggtgctctactgcgggatctgccacacggacatccaccaggccaagaaccacctcggggcttcaaagtatcctatggtccctgggcacgaggtggtcggcgaggtggtggaggtcgggcccgaggtggccaagtacggcgtcggcgacgtggtaggcgtcggggtgatcgttgggtgctgccgcgagtgcagcccctgcaaggccaacgttgagcagtactgcaacaagaagatctggtcatacaacgacgtctacactgatggacggcccacgcagggtggattcgcctccaccatggtcgtcgaccagaagtttgtggtgaagatcccggcgggtctggctccggagcaagcggcgccgctgctgtgcgctggcgtgacggtgtacagcccgctgaagcactttgggctgacgaccccgggcctccgtggcggcatcctgggcctcggcggcgtgggccacatgggcgtgaaggtagccaaggccatgggccaccacgtgacggtgatcagctcgtcgtccaagaagcgcgcggaggcaatggaccacctcggcgcggacgcgtacctagtgagctcggacgccgcggccatggcggcggccgccgactcgctggactacatcatcgacacggtgcccgtgcaccacccgctggagccgtacctggcgctgctgaagctggacggcaagctcgtgctgctgggcgtcatcggcgagcccctgagcttcgtgtcgcccatggtgatgctggggcggaaggccatcacggggagcttcatcggcagcatcgacgagaccgctgaggtgcttcagttctgcgtcgacaagggactcacctcccagatcgaggtggtcaagatggggtacgtgaacgaggcgctggagcggctggagcgcaacgacgtccgctaccgcttcgtcgtcgacgtcgccggtagcaacgtcgaggcggaggcggcggcggcggatgcggccagcaactgatggcaccgcgtcgtcgagtcgaaccacgtctgtgcgccgcgtgcaacgttcgttcgggtcgagtctgcgtgcaacgttctgcttcctttactagttgttgtctttccgccttcttgccgttctgttctgggctttgagatgagacgatggatggtcagtttttaatgtcagactgaataactacgtatagtactgtagtattactcggagtacgccagaatgtggtgtggtgtcagtctcaccagcaatctggatttgccaagtgtttctattttttcttcggtttgcccgagtgtttgtgattgttaagaactacgttattacggatcgtcaaatccgttcccttctgtctcgtctatagtttagacgcgagaaaatattaaagacacgtctcccattccagaagcacgatagaagaacttttatttctattttaataggttgtttcttt

SEQ ID NO: 5260 - DNA, 1561 bp, Zea mays
caggctgccgtaaggcagcggatctggttcccccccccccccccccacccccccaaaatggttgttttttttttatacaaaacgaccacaaaaacaagcgtcctgctagttctatacatacaacaaaaattaagcgacgacgacacaagtgatgatactatgaactgatttattgaaggggggaaaactacgactagggcataattacatctttgggaatatacacatccgatgcttgagggactcaatgatgcaatcggacctgtgccaattagcacaagagaatgcggtcagccagaatatcactttgacgcaacagtagcagccaaggcattgcgccagactagcagttcagaacttttcacgacaggacaggacaaaaaaccggacttatcgaacatcatatcactcttgagacccattttgagaatcttcttggcaaatatttgatgatgatttgcttggattgattattgcaggcatccattgctcaggaatgacaataaaataagcagacatggctttcctgaaccgcttcttatattgcataggtgaaatgacagttggagaagcgttcttcggcccacctagaatgccagaagattttacccatgtttcaaggtgcttgtcccatgtatactgcctcataaaatcaataattcctaagaccagttcatgtttctcctcgtcgactcccacaagcaaggaatagtccatcacatcgattccagctaggaaagatgtaccgtcacagtcagccctacagattataagaaaacagaaaaaggtaacctatagttacaagaagataaacttggaagcatcagcacttcaagtgatggaaccacagatcaagtaaaaaatgatcaagatggcttagcaagttatacaagaagtcagctcaccgtcatgtttgctattctcaacacataaatcacagcaatgcaatatgtgatactattaaggcccaaagctactcaggagcaggtaaatcaaatttcaaagcaaagtggaaacatgacatgcagccatgcagattcatattccattatctgtcaagtttagtattgttctcttaaaactggaaacacaacaaaagccggtcttctaatttattatattaaagattagccttttaaaaaaagaaaggacaatttctctcttactctcgctgtatactacgactatacaagaacttaaggaaaacaaatgaatataggtctgctaaaagaggattaaatgggaacagagggattaaaaacaagaatgctcagctatgattacgagtcacaaccacccactttggtgctaataagaagctagattctgatccaaaaaatcaggctgaagattgttgaacaaaagaagtgaagttgaagatagctctggaagccactgcatttcctataagctttgatgaggataaattgatgcaaacttacagctaggaaagatgtatcgttccaaacagctctttccagtagccgctttgccttgttcccaacaaaaatcggtgaagttggcattgcttcaattaagttctggtcaagaagaacctgtt

SEQ ID NO: 5261 - DNA, 1398 bp, Zea mays
aagaaaaggtcacatacctgtcgtgttttgttgagtggcgacttgcgagcaccaacaaagccgagtcacgggccgagcccacgggagattcctattggcatctccatccgtcctcgtcggcatcccagccacacacacacacacacacaccgcacctagccacctaccctgctgtcccccgtgccgtcgccgatggagtccctgggcgtgctgctgctccaccccttcaacgcgtacctggagcaggagctggaccgccgcttccgcctgtaccgcttctgggagacgccccgcgaggagttcctccgcgcgcacgcgggcgccgtgcgcgccgtcgtcggcaacgccagctacggcgccgacgccgcgctcatcgacgcgctcccggcgctcgagatcgttgcctccttctccgtcggcatcgaccgcgtcgacctcgccaagtgccgcgaccgcgggatccgggtcaccaacacccccgacgtcctcaccgacgacgtcgccgacctcgccgtagggctcgccatcgccgtgctccgcaggatcccgcaggccgaccgatacgtccgcgcggggctctggaagtccaggggagactacaccctaaccacgcggttcagcggcaagcgggtgggcatcatcgggctgggcaggatagggcaggcggtggcgaagcgagtggaggcgttcgactgcccggtgagctaccaccagcggacggagcagcgggcgacgtacccgagctacacctactacccgtcggtggtggagctggcggcgaacagcgacgtgctggtggtggcgtgcccgctgaacgcgcagacgcgccacatcgtgagccgcgaggtgatggaagcgctaggccccagcggcgtgctgatcaacgtcggccgtgggccacacgtggacgagcgcgagatggtggcggcgctggcggacgggcggctcggcggcgccgggctggacgtgttcgaggacgagcctaacgtgcccgaggcgcttctggggatggacaacgtcgtgctgctgccccacgtcggcagcggcaccaacgagacgcgcaaggccatggccgacctcgtgctcgggaacctggaggcgcacgtgctcagcaagccgctgctgactccggttgtctgacgtttccttgtttctattacgaaataacaagcgcctgcgcctgacagcgagtggggattaaattcaaaatgttttgttttgatttgatcgccgctggtgaatggaactgaaatgtgctgtcaattctcagtccagtgcacacgacacgcttgcacgaatgtcgagcaaattatggcatcttcttttgcgaagccgcctcctcgtctgtacactctcttcccctgcggccactttacgtatctgcgatgaggtttgttc

SEQ ID NO: 5262 - DNA, 1652 bp, Zea mays
ggccgggaaaaaaaaaaaaagagccggagggagatcaaaaggaaggaggcaaagctttgcttctgagagagggagagccggagagcgaagagaagcaggccaacccacccccaccccctgcactgcaacacaatccccccatggcctctgctccagctgctgctatataagcgcgacccgggcgcccccgctgcccgccgggagtagtcctctcctcccatccatctcatgcttcggtccacgcacccacccagccccaccagcggcagctccgcggcgccggcgtccagctccgacgccgcggcgatggtcgggggcggcgcggcggcgggcagcggcggcgcaccgagcggcgccaagctgctgcagatcctcaacgtgcgggtcgtgggcagcggcgaccgcgtggtggtgctgtcccacgggttcggcacggaccagtcggcgtggagccgcgtgctcccctacctcacccgcgaccaccgcgtggtgctctacgacctcgtctgcgccggcagcgtcaacccggagcacttcgacttccgccgctacgacacgctcgactcgtacgtcgacgacctcctcgccatcctcgacgcgctccgcatcgcgcgctgcgccttcgtcggccactccgtctccgccatgatcggcatcctcgcctccatccgccgccccgagctcttcgccaagctcgtactcatcggcgcgtcgcccaggttcctgaacgaccacgactaccacggcgggttcgagctgccggagatccagcaggtgttcgacgcgatggcggccaactactcggcgtgggcgaccgggtacgccccgctggcggtgggcgcggacgtgccggcggcggtgcaggagttcagccgcaccctgttcaacatgcggccggacatctccctccacgtgtgccgcaccgtgttcaacaccgacctccgcggcgtgctgggcatggtgcggtccccctgcgtggtggtgcagaccacccgcgacgtctccgtcccggcctccgtcgccgcctacctcaaggcccacctcggcggccgcaccgccgtcgagttcctccagaccgagggccacctcccgcacctcagcgcccccggcctcctcgcgcaggtgctccgccgcgcgctcgcccggtactagcggagcgcctgccacctacggtcctggtggtcatcggtattttttaccgcctcgatttaccctgtgccgagaccggggacggggatcagataatgtggcgacccgcgccgtttgctgtgcgcgccatgactgtagactgtagtacgagtgtacgacttgttctggacttctggtacccgatttttttactgctttttaatggagagccgagcagtagcactggtaaaaaaaaaaaaaaactcttctcctgcacctccacccaggtcctggtgggcctgctcgcgacacgtggcgagtactcgaggcggtgcacgagctcggtccagattcgccttcgccttgtcctacctgctacctttgttattttactgctggtagtttactgctatgagaatatgagatagggatcagccgccgccccgtcggatattctgactttaaaaaaaaaaaaaaaaaaaactcggaggggggcgcccggtccccatttcgccctatagagg

SEQ ID NO: 5263 - DNA, 2055 bp, Zea mays
ctgcagcggctacagaaattgaactgaccgaagccaattttttaaatttaattattttgtagaaaatactaccaacatttatatctttagctaagattgttaaaatactatattcactaattaatacaacaatattttaatatcataagtatcatttttatataaacttaagcaaaattaaaattatttgaaaagtgaaagtgggaatcgcatgacccggagcaccggccgaagcaggccggaaacccagcccgagaaaggaggaagaaaaactagaaaccctagcgatgctgcagatccgcctgagcaagattggctcgtcggactccggcggtgccgccgctagcacggcagctggcgccggcgcccccgccgcggttggggcggctgcggcgctcggcggcagcatcctggaatcggtcaccgtggcatgccccgaccacctcgtgatcgcggacctccccgtcgcgaagagcctcggcgccgtcacggcctccgctgccgccgccacgcgcgccatcggccgtcgctcccgtcgcccgctcggggagcgcgtccacatctgttcccgctgcgagttccccatcgccatctacggccgcctcatcccttgtgacccggcccccgccgggtcctgggcacgaagcgattctagctgctatctttgtgatgagcgcattcagaagatacaaagtgtgaaaatgatggaggggattttcatctgtgctgcaccaatgtgtctcaaatcgttccttaagaaagcagattttgagttccatgtgcctgatgtccatgccaacctcctccaaactaatctagagaaggaagaagaacgcaatgagtcagatgctcctaacatcccctgtgcttctgcaggggatactcaaagacaatctcaaatgcctgaaatgtctactgcacgtgctcctcctccaaggccaggtgtttcacaagatcgtgaagaacgctcccgctaccaccagtccagggagcaaacaccactgaggcctccacccctttcaaaaccaccgttccatggtcgccattcttacccaccaggggatactcaggccgagaacaatccacctcaaggattcgaccggccatacaactgggcttctcaatcacgtcaggagagcccaggtgcggtgactccacttcgccaagaatctgaccacagtactcaggacaggcagcaattgatggctaatgcaccttttatgttcccgccgattcctcctcaccagggaaactttatgatgcctatgaatatgaatcagcctttgatctccaacgcaccattcaattaccctctccagcaagatggaaaccctcagtacttttctgcccctttccagatgccgccgctaccagatactggatcagaccaaggttccatgtcaagtgtccagcctccagttggccctatgagcttccctgaggggcttcagcgcccatgggctatggggatgatgggtaatccatttcacccgatggcccttggtcagggaatggttgatggtgcgggtgatcctcagggtggtggtggccttgccttcatgcaagctggttttgggggcatgcctgatggctccatgaatacaggcatgcccgatagaggtgatggaaggggtgttcgagcacagatgcccacgccaatgcaaatgcagatgtcacttcccccacctccgcctacacaacctccatcaggctcgcagcaaacatttaacaggacttgatatattttgttttgcacgaatcgatggttcctctcaaaattccatgtcaattcattgaggaaactgtaattttatcgtctttggcatgtaacctgtgagaactagatggctcagttctattccctggtttgataggagcctgtgtattatgctgtaactgtcctgtttgaatgaagtgttcccaagttacgaaattttagttcagggtgattggttgtactaccgttcacaaatatttgaacatatgacgtcgttcgtcttattcagaatatttatttgaaaatataaaatttcaagttaaaaaaaaaaaaaaaaa

SEQ ID NO: 5264 - DNA, 1378 bp, Zea mays
aattccgcgcggccggccgcggagccatccggtcccaaaagtagaaaagggcaagcgacgagcacagcacagcacagcacaagcacgccttccgttttgggaaggcgaggagaggggaaccccggcccagggagagttgtggggaggggatcggcggcggaggagatggaggagcgggagaagctcgtgtgcctggccaagcttgccgagcaggcggagcggtacgacgatatggtggaattcatgaagaatcttgctaggatggacgtggatatgagtgctgaagaaaggcatttgttctcagttggtttcaagaacactattggagcaaagagggcatcatggagaatcatttgttcacatgagcaaaaggtcgcagctgatcgtcagactggtgtgatgatagatgcctataagaagaaagtagaagaggaactaaggaaggtttgcaatgaagtattgtcagtcattgctattcactgccttcccttggccagtacgggtgaaaatatcgtattcttttataagatgaaaggtgactactaccgttacttggctgaatttagcactggaactgaaaagaaagctgcctctgatcagtcacttatggcctatcagcatgccatggttgtcgcctccagtgagctctcacctgctcaccaaatccggcttggccttgccctcaatttgtcggtcttcttttatgagataatgaactctcatgagagagcttgccaagtggcaaaacaagcatttgatgaggctcttactgagataaattctggtgagggagtttacaaggatagcacacttatgatgcagcttctgaaggacaacttagcattgtggacatcagaactaactggaggtgaagcatccaagggtaacgacgatgtcgacatggagggttgatacattctccatgttttaaggaaacacagaaagcacgcaaaaatatccaggctgtgatgctagcgaacctgggtcctcaagttttttctgcatcggaactcagaggagccttgtgtatttttctgaagtttctgtccgtctcgggtttttttttttgaggtctgtttgttcctctcttttggccatcgtttggtcctggagtcagtcactcactaccaagtgtttcagaggtctgaactggtgagcatctagatctgttgttgctttttttttcttcttctgtgcttcagaggcatctttgtacaccgatggaaaactgtttctcttatcaacgcatagactgtcagtgctgttactaatcatgttcggtgactgaagcagtctctgtaatgttgagatcgatcataaacaactccaccagattatgtaaaaaaaaactggtctgaagatgcttcgtcaatgacat

SEQ ID NO: 5265 - DNA, 1806 bp, Zea mays
ttgggaccctcgaggccggccggggcacgtatgctctccactccaactcacgccccggccgggttcgttttgtttcgtttcgtttcggatcgtgccgctgccgctcttcccttctcgtctagtcttgtttttctttcctcctctgttactccacctacagacctactactgccatcgggagggtaagctcttcggagccggagccgggtccacgttaacgccatcgagtgctgcgatgggcagcttaggagggagcgccggtgctggggacggcggcaaggtcgggctgccggcgcttgacgtgacgctcgcgttcccgcaggccacgcccgcatcgctcttcccgccagccgtttcggactactaccaatttgatgatttgctgactgatgaagagaaggcactcaggaagaaggtccgaggtatcatggaaaaggaaatcgcgcccattatgactgagtactgggagaaggctgaattcccattccatgccattcccagccttgccagtcttggtttagctggtggtacaataaaggggtatgggtgccctggactctcgcttacagctagtgctatttcgatagcagaggttgcacgggtcgatgcgagctgctccacatttattctagtgcactcctcgttggctatgtccactattgccctttgtggatctgaggctcaaaagcagaaatacttaccatctcttacccagttcaaaactattggttgctgggcattgacagagccagattatggaagtgatgcaagctccctaaggactgcagcaaccaaggtacctggtggttggcatttagatggacaaaaacgctggataggtaacagcacttttgcagatgtcctcatcattttggctaggaatgcagatacaaaccaactaaatggatttattgtaaagaaaggagctcctggtctaaaagccacaaaaattgaaaataaaattggactcagaatggttcaaaatggagacataattctaaataaagtatttgtccctgaggaagacagattaacaggcatcaattcatttcaggatataaacaaggtcctcgctatgtctcgaattatggtggcatggcaaccaataggcatatcaatgggagtttatgacatctgccatcggtatttgaaagaaagaaagcaatttggagctccactggcagcttttcagctcaatcaagaaaagcttgtccgcatgcttggcaacattcaggctatgcttctcgttggatggcgactgtgcaagctgtatgagtcaggcaaaatgacaccaggccggtctagtttaggcaaggcatggacgtccaagaaggccagggaggtggtttctcttgggcgagagctactgggtggcaatggcattttggttgattttcttgtcgccaaggcattttgtgacgtggagcccattttctcgtacgagggcacctatgacattaatagcctggtggctggcagagagatcaccgggatcgcgagcttcaagcctgctgtgtcagcaaaatcacgcctgtgaaagttgtttttttctttgttccccaatgaagacagtagaaatcaaccttatacattcagatgattgggaataagaacggtaggaaagctgtaaaactcgacgtgcttcctcgtatgtactgttctgtttcaaattattcgacgttttgtcggaacggaacggaagacctgtatggctgtatatgatactcatatcctatatatcactgctccaggtaatttgaagattttgtaaaaaaaaaaaaaaaaaaaaaaaaaaaaaaaaaaaaa

SEQ ID NO: 5266 - DNA, 2096 bp, Zea mays
gggagtgggccaggcaaagtcggctcttgcgtcgacatcgacggggagaaacagctgtgggcaggcgatgaactgtagcgcgtgacagtgaggggatttggttggatccaatgtttggtcggtctgcgcacgagaccattacctagaacatcctaatcgcaatataaagcgacggggcccttgcgctgggcgcggagactggagagggcgagagtcctcccatccacaagttcttagcttttgcgagattgagatccggctggggacagaccgacagaggaaggtgaattgtgggaaagaggacagaaaaatggggattggagatggatcttcaaatgggaaccagcaaccggtgcataaggaaatacgagatgagaccacaccacttcttccagtcaaggtggaggaggacgaggggtttcatgagttcaatggagcttcattctctggggcagttttcaatctgtcgaccaccatagttggggctggaattatggctcttccagcaagtatcaagatgctgggcatcatcccggggattctgttgatcatccttgtggcactgctcacagaggcatccatcgacatgcttgtaaggtgcagccaccagggcaagattacatcatatgggtggctgatgggcgaggttttcgggcagtgggggagaattgcgctgcaggcctccgtcatcataaacaatgtcggcgtgctaattgtttacatgattatcattggtgatgtattatctggaacaacatcaggcgatgttcatcatcgtggtatattggagggctggtttggagctcatttgtggaattctcgtgccattgttcttcttgccacagctcttttggtgttcgctccgttggtgagctttaagcgcttggattcattaagatacacatctgcgctatcagttgccctggcagtagtttttgtcgtaattactgctgggattgccatcatcaaactcttcaatggaactgtagcgatgcccaaactttttccagaattagatggtcttaattctatctggaatctttttacagctgtccctgttcttgttacggcctatatctgccactataacgttcacagcattgacaatgaacttgaagacagaacacagatcaagccgattgtgcgaacatcgctgttcctgtgctccagtgtttacattgccacaagtttctttgcttatctcctcttcggtgaaggcacactggacgacgtgctcgccaactttgacgcaaatcttggcattccattcagttcagtcttcgatgacatagtgcgagtgagctatgcagcacatgtcatgcttgtctttcccattgtcttctttgccctccggctcaacttggatgggttgctcttccccacgtcaaggcacatctctcgtgacaacaagagattcgccatcatcaccgtctctctcctcgcagtaatttatcttgctgccattctcataccaagcatctgggacgcgttccagtttactggtgccacagctgctgtcctgattggttttatatttcctgccatggtcatacttagggattcttacggaatcgcaagcaagcgcgacaagattctggctgtaaccatgatcgtgcttgctgtcctgtcaaattctgtcgccctatacagtgacgcgatgaacatcttccgtaagaaggaagtggcctgatctcagatttcaaaagtagtcagtgctggatgaagaatggtctcgcaatgcaagactcgatggtacgaaggaaaacgatgcgcttggattccgtgaaggaacgatttctttgtcagcacctcagaatttggccacttgaaagaatctgatgcttgaagtttcctggttctgtgtacacaagtcggctcaatgtcagaattgagccgcttgaaatatatttagttatattctatgcggagagtaggtcttggaaacagccttttccacaataatgtacagttattatgccaatttctgagttcagttaaattttgtgaaatatggacatgggcgtcttgtctcgattaaaattgagaatggtatgattgcacattacgtcgctaaaaaaaaaaaaaaaaccgccccc

SEQ ID NO: 5267 - DNA, 3063 bp, Zea mays
gagcagagcacaccatcctcgcattattcttttcggatttgctccacccctccacccccatgcccgtgtccatctcaggctgcgtcacatcatcgccgccacacccagcaccagcaccagcaccagcggcggcgcaccaccaccggtgccatcgccagcgccagcgctagcgccggcgcaagcggaggcccgggcgacgcggactgggcgaagttactggccttcttttcgtcagcggcgttccttgccatcaagctaaggtcttccagcaaggttacgtggagtttaccaatgggtctggataatacttatggcgacctatctggcatgttctatggaggcctgtcttatgatggctacacagaccacagcagcgcaaacgattacttcagatttgccgatccacttcctgccactgtgccccagatggcagcagaagcctgttcaaatccttcctccactgtgtcaagggccaatactgaaactgacaacccagaggattgggaattcatctcagatgagtccctcgactatatcagccggatgctcatggaggaggatattgatgagaaagttagcatgtaccaggcggagtcagcagcactgcgtgctgctgcaaagccgttctatgacattcttgggcacaagtttccaccgtctcctgaccgccagctgatctcttggtccatggacagccccagtgagagtagcagtagcatctgcacacaatctgtggcaagtactgtcactagcagcagtgttggtggcacagtggatagcaacaggcgctatgacattggacttagtgagcagctggaagcttaccgaggcttgtgtggtcaggcttcgaatccacttgttggtacatcaagtgatgcttccaatgcagtggatgtgctagaagaccctttgatcacgaacggtcagatccctgagtatttgtttgagagccttccaacttgggatttcaggagaggtattgaggaagcccagaagtttcttcctattaacaataaactagtcattggtttagaagctggtggtattgcaagaccccaagaggcaaggaaagatgttcctttgaatgccaaaaaggcagatgcattgaaggtcaagaaaaatagacagagtgaagaccttgacgtgattgaaggccggaacattaaactgtctgcattttgttccgatgaacctgattggattgaaatgtttgatgatctgcttcttcaaaccgagaagaaggccacagatctgcgagagctgatgcggaatgaagcttccaagaattctcaggtcacccagacgaaaggaccaagtggaccacggccacggggaaggaaaccaacaaagaaggatgtggtggaccttaggaccatcctcatccactgtgcacaggctgtggcagcagatgaccgcaggactgctaatgaattgttaaagcaaataaggcaccattccaagccaaatggtgatggaacccagaggttagcacattgctttgcagatggtcttgaggctcgattggcaggcacagggagtcagctttaccgcaagcttatagcaaaacgtacaactgcctcagacatgcttaaagcttaccacctttaccttgcggcatgcccatttaagaggctttcacattttctttccaatcaaacaatcttgagtatgactaaacatgcatcaaaggtgcatatcattgacttcggcatttatttcggcttccaatggccatgcctaatcaggcgtctctccaagagggaaggtggtccacctgttctgcgcattactggaattgatgtacctcagccaggtttccgacctactgagagaattgaagagactggacaaaggcttgcagaatatgctgagaagttgaaggtgccttttgagtatcagggaatagcatctaagtgggaaaccatccgagttgaggatctcaaagttggcaaggacgaagttgtgattgttaattgcctatacagattcagaaacctgattgatgaaacggttgctgtagacagtcctaggaatagagtgctcaacaccataaggcaagtaaacccagcaattttcattcatggaattgtgaatgggtcatacagtgttcccttcttcatcacacgtttccgtgaggcgctgttccatttctctgcattgtttgacatgctagagacaactgtcccacgggatgatgcacagcgtgcactcatagagagggaaatgtttggccgagaggcactcaatgttattgcatgtgagggctcagacagagttgagagacccgagacatataaacagtggcaggtgaggaacctcagggctggatttgttcagtccccgttaaaccaagaaatcgtgatgaaagccaaggacaaagtaaaagacatttatcacaaggactttgtcatagatgaagacagcggatggctcctgcaaggctggaaaggaaggataatctatgcaatatctacctggaagcctaagaataactaggttcttggtctcacatgttacgtttcctattccattgatggtagcagctaattaaccagtcctgctatgttatagcatgtggaccttgacctgtgaacctgtctgatcaaggaaatggcttgaagacggataatgatcaacatggagctttgctagcttcacatctgtccagccagtactctgatagactgggtgtagacctctctaccttggtgttggtaccattacttctattaaatttcgtagttttcttctttccatttacttctatgatcggcctggcgtcctattagcaataaccagatcactgcttctagttaattggttagccaaactacctactatcttgagcttagtatttttgacttgtatccatccatgttgaacattatttggttttcagcaccagcagataaaaaattccccaacgaggaagcatgaagcatctaaatttgttatacgagaatggacgctgctgtttgtgtggaatgtagtatctcatggagtgctttgcctttgaaaaaaaaaaaaaaaaaaaaaaactcgaggggggagaccgggtaccca

SEQ ID NO: 5268 - DNA, 1229 bp, Zea mays
gaaattttccgaattcacatcactcaatcaagaccagatatttatggacctgcatttgtggaagttgaaaacatgtttgggttatcaaattttgttcctatcctttttggaagcaaacagttgtgttctgaactagagaggatacatgatgctctttgtggttcttacagtgaaaataatgtacttggtgagtttctcagtgcttcttctgatcctcatgagccaccggaaactttgtagttctgtgatgtctggattcctgatcgacattggatggcttatcagaaagcctactcctgacgaatttaaaagtgtgctgagttcaacaaatatacagagatggatatgcatgttgaagtttttgatacagaatgatttcatcaatgttctggagataatcgtgaagtcaatggacagcatcatgggttcagaggttctttcaaacttggaaagggggaggttggaagatcatgtaacagcatttcttggatatgtaagccatgctcggaatattgctgatcgtagagctaaccatgacgagaaaacacagattgaaacaagaggcattattgttacttctccaaatcagccaaacttaggcgcctcagtgccatttgctagtgaaaacactgactttggaggggataacaaattgaactcaactgatgaggaagaaattatgccacttgtgactagagatgtctcacaccggcactgctgccagcctgatacgactgttaggtggcttaagccctcactgattgttacttatcctggtggtgccacgagaatgcgacttgttacgactgtggcggttgcggctgttttgtgtttcacagcttgtcttgttcttttccatccgcatggggtaggggtgcttgcagctccagtgaagaggtacttgtcgagtgactccgcatcgtagttgatgttatagatcagatattctattttgccgtgccgctctgctctgtctgtatcatctgcgctttgttaagttgaggcatagcttgtgtatctgatttttttgtaagggaaccaacacgcaggtgcttttcatctgtgcaaaactggcatcttttgtttttttcagactgtaagtataggcgccggaagctctgacctgatgtttgggcatgtaaacttctaatgtagtgcatcagttaatggaaaatagctgcattgctgcaaaaaaaaaaaaaaaaaaaaaaaaaaaaaaaaaagcggcc

SEQ ID NO: 5269 - DNA, 1502 bp, Zea mays
  misc_feature (1501)..(1501): n is a, c, g, or t
gcacgagaaggtttaatttgcattggctaagattatcgcataaagttttagagcccaattcaaccacccatctccgccctccggtccttgctcttgttccttgcgatgaacggctgtgaacctcagccttggatgagcttggcgaaaagtatttagtattacaagattcatggtacaagataggtgacattacaaaatcaccaaaataagcgtctaaagtctcacatctaaagaacataaccactactctaaggcctctgtggctgtactgaacatttgaaaattttcacttgctggcaaaccgttgacattgattaaacaccctacccgctgtttgaatgttcctttccagagcagccatgaccccataacaaaagatccaccactcttggcttcatacatgtgtaccaatccaacttcataccagaatatagcaatcatcaccatactgaggcccaacaaaaggctacacgtcatattgcttggcaaaatcatgaatccttggaggaatgcttagtcgcagtataatctaatcacagagtcagcgccagcagtgaacaaccatggttgtttagggtggaacttgcagtccaaaacccctcttccatccgaactagaatggccacgaagaatttccaatggtacaataagtgggttctggttaagatcagaatagaccattccatgacatacataggcagtacaatcctcggaggatgaggcaaaaagagggtactttcggtgaaaggcaacactggtaacatctttagaatggatctttagagtcttgtatggtctggtagatagatcagtatcaaaccagcataattttccatctctgcttccgacaataacattatcaccaccaggatgaatcgagatggaggaaatctcgcgaagacctgactccagcttctttaccaactgcgctttttggagatcataaatctgaacaaatttcttagtagcaacaaagaacatcttctgacttggatggaatgttgcagcaacaggaaggcctggcattttacggaaaggatggtgcgagtgctttttcgtgagctgatgcaacaatacagctctcgtatcaccagttggcacaactgtggtgaagtaatctcccttgtaatgccactccacatttgacacggccttttgatgaactaaggtgatcccatcaagtttttcatgcttcaaccacctcacagctggtttcttgtcatcagtgtcatcttgaagagccatttcatcaaccttgagcagatcttttaccatcgtttgcatttcttcactccccacctcagcattaataagtagtaggtcatgtccaacgacagcagcaagaataggcctgtcaggtgaaggattccaggcaatatgacggacatcacctccaacatcccaaactttaagacagcgaccagtttcaacctcccagacacgaattgtaccatcacaagaaccagatgcaagccactgccctgtaatttcgaccgaaatng

SEQ ID NO: 5270 - DNA, 1437 bp, Zea mays
caccccgcgcctcgcggcggggaaacatagtgcagcaagcaactgcaaagcagcaagctctactcttcttctgtactgaacgtgtgactagataacaataagcgtgaaccatggcggacgagtacggccgcagcggctacggcaggtccggcgccggcgacgactacgacagcggctacaacagcaagtccggcactgatgactacggccgtggcgaaggtggctacaacaagtcgggcggcgatgacgactacggccgcagcggcggcgatgggtacggcaggtccggcggcgacgactacggccgtggcaccggcggtggtggctacaacaagtccggcggcggcgacgactacggccgcagcggcggcgatgggtatggaaggtccggcggcgacgactacggccgtggcaccggcggcggcgggtacaacaagtccggcaacgacggctacgacagcgggtacaacagatcgggcaccaccaacgacgacgaatacggccgtggcaccggcggcgggtacggcagcaagccctctggcgacgacgcgtacgccggcggcggcggtggcgggtacggcaagcagtccggtggcggcgcggacgagggcggagagtacggctcctcccgggacgactcggagaagtacaggaaggaggagaaggagcacaagcacaaggagcacctcggcgagatgggcgccctcgccgccggcgccttcgccctgtacgagaggcacgaggcgaagaaggacccggagcacgcgcagcggcacaagatcgaggagggcgtggcggcggtggctgccctgggcagcggcggcttcgcgttccacgagcaccacgacaagaaggaggccaaagacgcggcggaggacgccggggaggaggaggagtccggccgccgcggcgaggggaagaagaagcaccacttcttcggctgatcgggctgctgctcgatcgatctacttgcgtacgtaggctgctccccaggaccagaaggagcatgcatggagggcgaacaaagtcacgggggtttgattgcccgtctatgtatatcatgtgtagttactgatgatgtgtgtgcatggtacttcgtacgcgtgtttggtgatcgatgtgtggtgtgtgtgtctctgcatggacattttcctactctgcgttttttctctctctactgatatagtatatatgtggtgtgtctatatatgtgtgcacgtggttttcgctcggctttttatcaacgctttgagaataaaagctttctcttcatctgtatattttatttttaatgaaagaaataaaccactatatatttcgacactcttaaaaaaaaaaaaaggaacaacatccaaggccgccaaacttacaaactcgtgcaatgcgactaaatacgttctctatagcggcacccaaaattcaattccatggccggtt

SEQ ID NO: 5271 - DNA, 2814 bp, Zea mays
gccggccgggctggaccgcactcggcactccactctcctccccctgaccccgagttgagtccactctgctgtccgctcacaccaactcctccgctccccctccacccaccccgccccgcgccgcccatcagtgggtgggtgggtggttcgcctcctcatcctctcctccccgcacgtccacggcgatggcgcccgcgcccccgcactgctgacccacccccgccgcgcactctcatgaccgtggtttggtaggtggggcggaggttggtaggccgggacgtgccggcaggcggttacgggaggcgcggccgcgatcccgggccggatctggacgccgcgatggaggacgccgttgccgctgagaatgggatcgagggggagggctacgtcgtcgtcaaggcggcggcggccgcggaggcggagggggactccggcgccagcgatcgtggggatctcgccgcccccgctgaggacgcggcgccggccggatctgaggacgccccggccccggcggtgacgccggacgagaccgcggcacctgccaaggcgccggccaagaagggtggatccggggacgccgccggggtccggaaggcgaggccgcagaacggcagggtgcccgccgccgccgccaccgccgcgccgagggtgaagaagcccggggtcctctcgcagagcgcctccttcccggcgcggggtgccgccgccaagaaggcctcggcggttgctactcccaagcaggccaagggcgtcgtgaccaatggatcagaggcggcagcaggccgggcagccgagaagaaggcgaattcagcgcggacacctgtcgctcgccggtcgatgcctgtcaagtctggatcagcggatgcggccgccccaaatgacgcaattcccgctgtccaagagccacatgaaaacaccgacaagccattgaaacaaatgcagccagggaaaacagaggatgatgtgcgctccaccacatcaagtaccaatactccgcgtgcagcagctcgcaagagtgctgctgttgctgctggttttagtttcagattggaggagcgtgctgagaagagaaaggagttcttccaaaagcttgaagagaaaatccacgcaaaggagctggaaaaaacaaatctgcaggagaaatctaaggagagccaagaggctgagatcaaactgctgaggaagagcctaacatttaaagccacacctatgccaagcttttacaaggagcagccacccaaagttgagttgaaaaagattcccccaacacgcgctaggtcgccaaagctcggccggcacaagccagccaattctgccactgctgcttctgcggatggttctgtatcatgtgagagcccacggagcactgcaaattcgagcaaggtaaatgaagcgatggaaaacaacaaacctcatgcccctgctagaaaacctgttcagaggccagtcgtgaaagctccatcacaggcgtctgcgaccacaaaggctgaagcaagacccgtggtcacaaggccaaagatctcaaactcgaaacctaaggcttcaagggcaaaggttgcgcgagcgcaagaaaccccagctgaagcccctccttcagaacctgctgctccagaagatttcacggttgaacatggcattggagacgccacaggtcctgatctgaccgcgcaattggttgcttcgaacgaagtcccagtccatggttgatcagctgagcattttgcatatttattcccttcttgcagttctgtgaatagcgagggtgtgtgcttcattggaagttgaatcgctcgaagtgtcatggtttatcgtttccggagtagacatccattttgtttttcagcttgtcatcgggcatgccatgtatattgcttggtattgtgttcttgtttaaaatttccagtcttgtgtatattggatttgtttgtcgctggagatcctaggattgttgcaatacgctgaggcaaattgtggattgttttgtggctgttttacttttagccccgccgccattcttgttggttgtacatacttaggggctgtttcgttgtatacttgaggtgccagagaattttgccacactaccacatgtcattcatgagtgaggtctccatagctggagaaaatcttgccacaattgtggttacaaaccatacacgtgtctaaattgaccaaacctatctaatcttaggcaactttagtctttttgctctaagaccataaatggctagggcctgcttggatccatacacttttagctgaactttagcacttagagaaccaaacatgagtgctaaaagtgatgtgctaaattttagcactcattggcctgttagctcttccaagtgtgctaaaatgagttaaaagttgtctagtaggagaaaaagacatttatcttcctcaccctactctctctcccttatccatgtgctaaattttaactctccatttgagagggctaaattttagcacatatgatccaaacatgtccttattataaaaaggtgccttttgtgatgacatcacgaactagttcccaaccaattatcccaagaccacaaatgtttgatatggttagtacttgatgttttgcattaataagaggttgatgatggtgttggtgagggtttacaagagatgatttgttgttagtcttatgccctatttggattcatggtgctaaagtttagcactacacttttagatagattttagcatttataaattcaaatgtgagtgctaaaagtgaagtgttaaactttagctccccttagcaattcatgttctctaagggggtgtttggatcccatgtgc

SEQ ID NO: 5272 - DNA, 3146 bp, Zea mays
  misc_feature (991)..(991): n is a, c, g, or t
accggatggtggtggatggagggcttgccatatccgataccagattattatggtcagcgtttggggatgatgttatgtggtttctaggatcacaagtattattcgctggatggggctgcgatggttagaggcgttggctagggttagagggcgacaactagggttagggacgctggggagaccgaacataaggcttcacccatggtcgacaagggagaagggattttcttctaatctcttgcttaccttcaattgatacggtccttctctttatatagggagggttacttgacctctaagcactagatctaatattatctttaattctaatcttaatcaaactagccttatctttatctaacctacctgagagaggccctgacactttatataacggagtatacgtaatattttggatcaacacattgatcacgtgtagtaccacgcatatattactcctaaatttgatgctaaaactcttttgtaaggtatgtagctacttactatatattaaagcagccatgcatgtatcgaaggatgtctttaaccatcaagctcacttggatgctacattaacactatcatattgtctacatgtgatgaaaatatattatattatcacttttaaaaacatataagtctataatttcgaaatctttcaaaatttacaaaaagtgataaccgcaaaaagaaactacaccaagaaaaaaaatacaacagaaataaaacagtgtgccttacgttttcaaattcaatcattggcatttcagatgaatttgatagcaaattgcaacacacattccggctgattggccaggcgggcgagcggcgcctgccttgggcgagcctggatggtgggaaacgatatttcctcgcgtatccacacatgcagcttggatatatatttttacctatgctgcatctgtgggtgcagagtcaatatggctttacacagttaaccaaacaagggatattgcttggtcaacgcacncggtcagtctggatggactcgtgcgttcagtctggatggacgtgtacagtataccaatcaggtggattgtgtagatttggttgcaccaagagtccaagccgctgatccttcgtcagtcccgattaaatctctcgctagtcaaaattgaacaaaagcagcagatttaatcccctccgattcagatgcaaccaaatagggcccgggtgggcttttgctgtttttgacaaggaacaggagtaggatgtgttcttatattgaaataaaatgggatatgatcaatgcacaggcctccaataatagtaacatgatttaagttgcatggcgggccgaccaatcaactcgactacatcacgcaatgaacgccagaaactaaaattcctaactgcatgtccaatacccctttggttttatctaccaagtatccctacatgattgtttaacagccaaacggaccgttgcctacttttcataccaaaacaacatatgggtgacaaacacgaaaaaagggctacagtactgctacctatacaaaaactcctgtggtcaagaaaccagatatacaagactttacacagcggagaggtgttcgcccgactaggattttcctgctcgttgcggtttcatgctcgctctccgggctacatcccacggcttgtgtggcacgccgatgccttgctgcgaggcgaagaacgactcgtatcctggggagtcgaaggcaaagccagtgtgctttgatgactcccgtgggagcatcgagatcatgtagcttctcgcttcctctgggcttaggtggctggtctctggtagtggcaccctgctgtactcgtgtggctcatccttgtgttgctcctgtattatttggtagtcgtaggggaagagccacctttggatcctgagaacacagggtcagagatggttgacatggtcaggcaaaaaagctgaacttgtcgtaataattccacagaaatcaggtatcttacgatagatataggaaatccccaaacagggcgatgatcggaacaagtccgattgtcagatagaagaaaaaggtgctcatcagaacataaatcacaaaatacacattttcctgtctgtcaaatgacgtcattattgcagagtatatgaaaataaacataaaccaggccactatactgcccgccacacttatgtaatgccacctcgttatagagttgcatgccatgagaaggcggagattcacagtcaccacgacacaagtaaatgccatggtgctaacatcccataggccaagaatcttgccagatgaaccctgaccatgccgacttgcagctgcagtgaagtagaagaacactattgactgatagaaggcaaagaaaccccacactgcaatcactctccacttgaagaatgaattcctgatgccttccttgtaaagctgtgggtatttttttgacagtgacgcgctaacatccttatcaaacaatccaactataattacaggtagcgcagtaaaaataacgttatatagagactgaaaccagtcatcataaaaccgctggccagaaaaaccagtttgaaaagtgaaccagaactgagttagtgtaaatgtcagattcttgtagaagaagtatgtgataaccttgcacagtctcaagtaagaccatcgtccatgtacaagaagcaaatcagtaagaaaacgaaactgtgcaatggcaaagtcactagccataacagcttgcattccttcttggccactgatgccaatcccaacatgagcagcttgaatcatactcacatcattagcaccgtcaccaatgctgagagttattttctgagcgcccttcctaactaaacttgtaacctgtgccttttgcagcggagaaactcggcagcatacaactgagtggcaacttagactcaatccaagaagatcaacacgaagagttgggtccagtgcatacatcaggcatctaccatcaataatgagagccaacttcctttcaggggtgctaattaaagaatgccgggctgcctcgtgaaatcttttcagattctgttttactgaatcgttaataacacgtgcaatttccacagggtcaccccggtcttcagcctccctaatagcgcctgtctctgaactaatgatgaactgtttggtgtcattgtttaccaagct

SEQ ID NO: 5273 - DNA, 2292 bp, Zea mays
gattggtgtaattcctgccacattagatccaaaccgtttaattgctaacaacgcctggtccctttcagcggctgaaagagaccaggcgttgttatcaattggtgtaattcctgccacattagatccaaaccgtttaattgattattcttacctattgaagttatccagcttagctgataatctagcactgctgggccatacagtccttgaggatcgcgctaatgcttcaatagggcttgaacagggcagtgaacatgctatagacttttggaacatcagtgaaaatgatgaattctgctatggtggggcatgtgaagtccgtgctctgtcttcattacaagctttagcatctagagaaaatcaatcggtgttcatggaatgtttccagtgtgaaaagacagtttgcaaagcttgctgtgctgggaaaggggccttccttttgcttaacacctacagggagttgaagatatatggtgggagtcaaagtggtggctactcagcactcacagatagttttgtgtgcaaatcgtgctgcagtgaaattatcaaacgtgcattgtatgtggattatgtccgggttcttcatagtttgcgcagaaaagatcgtcccgcgccgccggcactgagtgctgtgaatcaggtctgccaactggagtacaagaaagcatctgatttatctcaaagtattcaatttggtcagagacaattgaagcagatccttgatggtgaagaatcccttgcagaatttccatatgcaaactttttacaaatggttgaaactgccaatgactctgaaccactgctttcattactggcgccttttggtactggagagtacacgtcttactggaaagctccacaaggtatcacttcagtggaattctcaattgttcttggtggtttatcagatattgcaggagtttccataattgtcagttcttgcggttactcagcatctgactgcccaattgtagagatatgggcgagtaataaaatacaccgagaagatcgtacatttataggaaagtgggatgtacaggatataatatcttcatctccacagcttcgtggacctgaaaaatctagtagattgagtgaagaaccaagacacattaaatttcacttcccaaatcctatccgttgtcgtataatttcaataaaaatgacactttcccatagaggttctcattcaaccaagtttagtggaggagtttgatcttctatcattgaatgatagctcatcttatgaatcgaagccaaccaatttacataattcatttatccatgcaaaaagaattgtagtttttggcagtttgttgagaaaggagatggagcctgacacatcaggggggataatgagaatgaaaagttatttagacagatcaccggccttggggagatttaggatcccagttgaagctgagaggctgagagataatgatcttgttcttgagcaatatctcttagctaattcacctggaatagctggattccggcttgattctttcagtgttataagacctcgtgtgacccattcaccttcttcatcagagttggacatgagggagttttcattgacacgaatggaagatagatttataaacccagcaattctgtatatacaggtcacagttgttaaggagtccggcaagttggttgtagaggaataccgtttaccagaagtaaaagcaaacacgccactatattttgatttcccagatctacaacaggatgcgcgctgtgttatctttagattgcttggtgacgtcactgcctttgtcgacgacatttctgagcttgagaacttaaacttgcggaatcttcctttggcgtcgggactgtctttgtcaaataagatcaagttgtactactatgctgatacatatgagatgggaaagatcggcagtctctcagctgtataatgtatgtgaggtcgtcgtacatgccaacctgggatggtaaccgtccctagaagattgttgtaacctactgtttctacgtgttgttgtggaagtaagagctgctgctacagatacatgatgctttttttttactgcttctgtattcttgcttctttttgcttttgattagatgaccccagtttgagggatgtagggattttgcctgtagaatttctggaaattcatctctttttttaatgtagaatagccggaaattcaattcgatcgcagtccacgaaactgccagctacgtttgtcgatacctgtattgggacctggattattgtatagagccaagaacttgcattgataaaaaaaaaaaaaaaaaagc

SEQ ID NO: 5274 - DNA, 3666 bp, Zea mays
tacctccatgtggtcacctcactggtacttcacacaatgccaatgcaatgcaccagccgacgaagcaccaacagcacttcaccaaataatatgtatactaccgagtattgactactaattcgcgtgcaccagctaactgaaactaaagtttttacataggagccttcactaagccgatataaagtacaagcaattaacctttttcacaaacaagtaattaagcgaaagttattaagagcgtacataattcttctgtagctgcaaatgacatgcataagtacgccggaccggtgaaaagcgatcaggcaaccgaaagagctagtcagtaaaagatacatgctttaccactggtactgcattaattaatgaaggagctagtgctgaacagtgcggcaaggactcctataaattggctgccgtgccgctaccatccaatccactccactccatcatcccgtgcctcacgagtcacgagtcactccaggtccaggctgagcagcaatggcgccgcgaacgctcggcctcaacgcggccccgctcctccaggtacgtaacgtaactcactgccccgaaactctcaccgcgttcgttcgtggcggccgcgtgcgtgttccttcttcctcctgcgctagctgcgcggttctgctcttcagtactcctcttgtcctgacagatctcatctagctcccagctggaagtttcacgcctttccggccattatgtgcgcatggaggtgctgaaaagaaaagtgccgtctttttgcctcactttccagaatgttttttttttcaattcaagatcagaatttttttccccagtccaccgaaccagatcgttcaggtcatgtatgtggtagcagccagttgttgatctgaagcacactcctgtttcctggaacagattctgcggtccctgtgcctcctggccctcgccgcggcggcggcggtgtccgggcggcgccacggggcctccccggcgcgcggcagcgggcagagcatgtacctggcgccggcctgccgggcgcacacggcgtcggtggcggacttcggcggcgtgggcgacggcaccacttccaacaccgcggcgttccggtccgcggtggaccacctgtcgcagtactcgggcgagggcggcggcggtggcatgctgtacgtgcccgcgggcaagtggctgacgggccccttcaacctgaccagccacttcaccctctacctccaccaagacgccgtcatcctcggctcccaggacgtaggcgagtggccaatcgtggatcccctgccttcttacggaagagggagggacaaggtcggagggaggttcgctagcctcatcggcggatcgaacctgaccgacgtagtcatcactggcagcaacgggacgatcgatgggcagggcgccatgtggtggtccaagttccacaagaaccagctcaagtacacgcgcggctacctcatcgagctgatgcactcggacaccatctacatctccaacctgacgctgctcaactcgccggcgtggaacatccacccagtctacagcagcaacatcgtggtgcaaggcatcaccatcctggcgccgaccaactcgcccaacaccgacggcatcaacccagactcctgctctcacgtccgcatcgaggactgctacatcgtgtcgggcgacgactgcgtggccatcaagagcggctgggacgagtacggcatctcgtacgggatgcccagccagcacatcgtcatccgccgcctcacgtgcgtgtccccgaccagcgccgtcatcgcgctgggcagcgagatgtcgggcggcatccaggacgtgcgcgccgaggacatcacggcgatcaacaccgagtccgccgtgcgcatcaagaccgccgtcggccgcggcgcctacgtcagggacgtgttcgcgcgccggatgacgctcaccaccatgaagcgggtgttctggatgacgggcgactacaagtcccacccggacgacaagtacgaccccaacgccgtccccgttgtcgccaacatcagctaccaggacgtggtggccacgggggtctacaaggaggcggcgcgcctccagggcatccagggcgcaccgttccggggcatctgcgtcgccaacgtcaccgccgacctgtccaagtccaggaagtacccatggaactgcgccgacatcgagggagtgtcggccaacgtcagccccgcgccgtgcgacccgctacagggcgcgcacgacggcgcatgcccgttcccgaccgacacgctgcccatcgaccaggtcacagtgcagcagtgcgcatacgacatcccggccaccaactagcagctcaatcaaggagtgtattcggatgtggatcagccgcctagtacaacttgtagttcaggtccaatgcaagcgactagtagtatcaagtctcatcaacacaataacgacagaatgaatcgggcactagcctagaaagcattcataaactccgagcctgtacaccatctacagcctaaagactgacttgactcatcacctgccgccgaagaacgagaagaagccgcctccgcctcctttcttctcgggcctctcctgctcttcgaccatgaccgccgtcatcgcatctctttccaccaatctccaagtagcctgctccagagcaaggccagcaggcgtgggcgggtcattcagcaccagcggcacgcccctattcgtactccggatcacctccgtgtcctctggcaccacgcctagtaaaggcaacccgagcatttcctgcacgtccagcgctgacatcatgtcctcccccttcaccaggtctggccgcactcggttgacaacgatcttgatgtctttgatgccatcgcactccagcagtcccgcgacacggtcagcatcgcggagagccgtaatgtcgggagtggtaacgagcaccgcctcttctgcgggtgcaatggcagtgacaaacccagcatcaacacctgcaaaacaaaacatcaagcggctgtcgttgacgctgtttgcgggtgggctggtcgagcgtcgtagcgcgtccgcgacccaggtgagggtcttggatccgaacgcgaggggcagcttggagcggggcttggagaggcagaggaggtggaggtcgtggagcgcgcggtggcggacgagcgcctggtcgagtcggcagtctcccgcgaggacgtcggcggcggtgaggtggacgcggttctcgaggccgagcaggaggtcgaggttgcggaggccagcatcggcgtcgacggcgacggctgggaggccgaggcgcgcgagagaggcggcgaggttggcggtggtggtcgtctttccgacgccgcccttgccggaggtgacgaccaccacgcgcggggtcgggcccgagagctcgggcgccgtgcgccccccgtggttgcgcgcggagacggcccgcgtggatgccgccgccggaggagggggcagcgggaggaggcgcggcggcgcgaacgccatcggcggactagggttggctagggttttgttcgggagctgggaccggggagaggtcagtccgagttggaggtggtggtggcggcggccgcgaccatggccgatgctacagtacagtatgtgtgtgccaccgcatttttttggtggaaagggttgaggaggcccacgttcacgaacagaacgggacagactttt

SEQ ID NO: 5275 - DNA, 1293 bp, Zea mays
ccacgcgtccggtcattgtggttatcgggttgggtcgggccgtatcttcgtaagcatacacacacacgcgctggtttagactcagcacacagcattcattcagctagcgagcgagagagaggggaacaaaaaggaagggcgaggaggacagggagccgagcgcaagagctgaggcttcgccgcgaaaccccagacctcgcgccgccccttcccctccgcggcgtcgtcctcgcacgctctccgatccaagatgtataagctggggagaggaaaccgcgacaaggtgcagcagttcatgaccattaccggcgccagtgagaaggttgcccttcaggcactgaaagctagtgattggcacttggaaggagcttttgacttcttctatagccaacctcaggtttctgtggtcaatactcggcatcttgaagatattttcaacagatataaagaacctgatgctgatatgataatggtggaaggaatatctcaattttgcaatgatctgcaggttgatcctcaggatattgtcatgcttgtcatatcatggcacatgaaagccgccacaatgtgtgaatttactcgtcaggaattcattggtggactgcagtcaattggggtagattcaatcgagaagtttcgtggaaaattaccatcattacgagctgagctaaaagatgacaataaattccgtgatatatacaactttgcattcacttgggcaagggaaaagggtcaaaagtctctctcactggagacttctattggaatgtggcagttgctatttgctgaaaggaactggcctcttctggatcattggtgtcagtttttacaggtcagacacaataaagccatatctagagacacatggtcccagctgctggaatttgtgaagacgaccgatccacagttatccaactacgacgacgaaggtgcctggccctacctcatagacgaatttgtggaatatctgactgagaacggactcgtccagcgtaaaagatgaacaacggggagatgcatctccaaacaatggttgggctgtacaaacatgatttatctcggtcagctcgacgcccagggcctgatattggcactcctgctcaattcattcaccaaactgttggcatatcattgaatttgcttataaacgtggggaaacataacttgcctgggaagtggtggctgtcagcctgcgatcgtgaactgtaacttatcgaaaatgcaacggagtttgggactctactatatgatttgtttcagtttttcttaaaaaaaaaaaaaaaaaaaaaaaaa

SEQ ID NO: 5276 - DNA, 943 bp, Zea mays
  misc_feature (935)..(935): n is a, c, g, or t
gcacgccgttgatgcgaaggaagaggctgttgcggcaatcatcgcctttgttaaatcgcctaatctctttcagtgtgatttgctcaacatgccagctgtttcacagcttgagaaggacgaaaagtatcagttggtgtatgaactactaaagatattccttactaagaagcttgattcctacttggagtttcaaagtgcaaactctgacttgctgaaagattatggtctcgtccatgacgaatgtgtaaccaaaatgcgcctcatgtctttgctcgatctgagcagccgatgctctggtgaaatcccttattctgcaatcactgttgaactcaggatcaatgatgacgaggtggagcaatggattgtgaaggcaattgcatccaagatattggattgcaaggttgaccagcttaaccagactgtcattgtcagtcggcacacagagaggatctttgggatggaacattggcatgctctgcgcacaaagctcggagcttggaggggaaacattgccagagctatcaacacaatacaagctaacaaagtcaccgaagagggggcacaagggatgcaaggcttggcgatccactgattcagggcagatcagcgggttcgtgaattgagattatagcgtgggagattagaagggcaacctttttttgtataagacaagctgtaatggtttatttacttagatcccgtaaccatgcctggttattccttgtatttggtcagacacgccgcgcattacacatcccaagtttttaccctcgacgtggtctgtcctgataaatttccttccctgatattttttttgccctttccaagctttgatcagtcatgtgtgttccattggagcatctgatgtatcctcctatcactggatggagtgggggtggaggggggctggggggtagagagaaaaaaaaaaaacncccccccc

SEQ ID NO: 5277 - DNA, 1980 bp, Zea mays
catcgggggcctcaaaaataaaatccaattttctcagtctcgagcgcccgcgtccctcgccccgtcgcgactcgcgacttcgcgagtcgccccgtcccagcctcccagccgtcccggctccccgcgaccccgccctccggcagtccggcgcgggggctcctctccgatccggtgagccgaacgaggatcccaactccccgaagaaagcggccacagccagagccagggtggctcggctctcctctcacagactgcgccgcagcgcctagcgctcggctggcagccgctccggccggtcggccccgcgcccccgcccctgctgcctacatccgcctgcagccagaagatctgcctccagcgaccgccctgcctgccccttgtggcttctgtggttctgcacaccagcacacgcacttgtccccaaacaacggcggcggcgatgagtatctcagaagagcttcccggcgaaggatctgacggtgaggaggaggtcttcatcaacgaggaggacatcatccacgagataaccatcgacgaagaagatctccccgaccgcgacgacgaagatgacgacgtcgtcaacgggatggttgattccgaagacgtcgatgattctacatacgcatttcaaggccaccaagatgaagtcttcattgtcgcctgcagtcctacagattcatcacttgtggcttctggaggcaaagatgataggggatttctgtggaggattggatcagaagagggtgccctggagctgactggacataaggatactgtcggcacagtggctttcagttcagatgggaatttgttggcttgtggaagttttgatgggcaaataaatgtgtggaatacagctacacgaactctcaagggaacccttgagggttccgggtcaggttttgagtggcttaaatggcattctcggggacatttgataatcgcaggatcagaggattgtaatgtatggatgtggaatgccgaccataatgccattctgaatacctttgctggacatagtaacacagtgacatgtggtgattttactccagatggtaaacttatatgcactggatcggatgatgcgtctttgaggatatgggacccaagaagtgcacaaagcagacatgttgttcgaggccatggctaccattctgatggattgacatgcttatcgatgacttcggattcacaaacggttgttagcggctccaaggacagttctgtgcacattgtgaatttaaactcgggccaggtcgttggctcattagcaggccacaccagttctattgagtgccttggtatctcgtcaagctatggctgggtagctacagggagcatggatcaaaagctgatcatctgggacctcacgcaccaatccagccgatgcatttgcgaacatgatgagggcgtgacatcactgacatggctaggttcgtcaagatacgttgcgtcaggatgcattgacggcaaggtgcgcatctgggacagcctctctggagcctgcgccagggagttcagtgggcatgcagatgtagtacagtcgctggccatcactgctgacggcaacaccatggtctccgcctcatcagatggctccgcccgtgtgtttgacatctccatgttcaagtgaaggaaaccgggacggagtacatgtttatgctatggcttgattgtgatgcacgattgatcatggcatgccatggtaatatgcgattgtactactctgctcatggaaaaatcgtgcatttgtattgcatatgactccacttgtagtatctattacagcagaacaaaggatgtatttatatatattccgtttttcccctttggagagaaggaatcaattgtgatagcagtgatagaattcggacgggaattctgtctcaaaattatattaatatgagctagtttgggccaaaaaaaaaaaaaaaggggccccctcgcgatctagaaccccacgcgtctgcggacgcgtgg

SEQ ID NO: 5278 - DNA, 2796 bp, Zea mays
cattgggtacctcgaggccggccgggcaaccgcgaggccggccccgacccctccctccattccatcgtcttcgcttccactccccacgttccccgcctgcttcctccaggccccggccagatccgcgcgcccgcggggaagagggcctcctctcctcctcctcccttggctcgcgctctggtcgaggaggcggaggccggtgccggcaggcggggaggtaggtaggtagcagcttgcggttgcgggagggaagctgcgcgcgctaggctgccatggcggtggagaagacgctgcccggcgcgagtgcggggaggaccgtgctggtcacgggcggggcgggctacatcggtagccacgccgtgctgcagctcctcctcgcgggcttccgcgccgtcgtcgtcgacaacctcaacaactcctccgagctggccgtccgccgcgtcgccgcgctcgcgggggaccactcccgcaacctctctttccacaagattgacctccgtgacaagggagcactggaaatggtttttgcttctacaagatttgaagctgtcattcacttcgctggattgaaagctgtgggtgaaagtgtacagaagccattactttattatgacaacaacgtcattggcacgataaatcttctagaagttatgtctgttcacggttgcaagaagttggtgttctcatcatcagctgcagtttatggatcacccaaaaactcaccctgcacagaaaattttcctcttactccaaacaatccatatggcaaaacaaagctcgttgttgaggatatttgccgggatatctaccgttcagatcctgaatggaagatcattttacttaggtacttcaatccagttggtgctcatcctagtggatatcttggcgaggacccacgaggaattcccaacaatcttatgccctatgttcagcaagttgcggttggtaggaggccagctctaacagttttaggaaatgactatgcaacaagagatgggactggggtaattctgttgcatatgatgtgcttaattgtgtttttttggtataccattcaaattgattaatctgatgcatttgaagctgggtattccaaataaaactgttgtcaattttctgtcaaaatttaataatctgtggtaggtatagtactaacaagagttatgagaactgtcatctcttccttaaaaaacttgactaggtctgtttatatgacttgctgcctagtgtattgacccggcttgttgaagttgatctttaactacacaggacttcctataatttacttttatttcatatattggctatgttgcatagttttcacctttttctttctcttctttggcaccctgctgtttatatctctatagtttttcctctgcactttgtatggttgctatccgattctatatttaattatttataatataccacattaggggtgtactgaatttcccttataaaaagaagattgattcattgctttgtcatttccttctctatgtaagccacaagcttaacttgaattctggaacgatttataacctacaaaatcttctcattttaattcatctgactgaaagtttggaagatactcgcacaatagaacatatgatacccatgtgcttcttacttgagtcaattattttttacattgcttagggttaatgattttgaatcaaatatttagcgatatcattgtgacatctgtgattcacatgcgtcatggaatcatcccatctttaatgactaggctactagtgttgggactggggtccgagattacatccatgtggttgaccttgctgacggacatattgctgcattgcagaagctttttgagaactctagcatagggtgtgaagcgtacaaccttggaaccggaagaggtacatctgtgctggagattgttaaagcatttgagaaggcttctgggaagaaaatacctctgatttttggtgaaagacgcccaggtgatgcagagattctgttttcagagactactaaagcagagagggagcttaactggaaagcaaaatacggtattgaagagatgtgccgcgaccaatggaactgggccagcaagaacccttatggctatggatcacctgactctatcaagcagaatggtcaccaaacaaacggatccgctgactcctccaagcagaatggccaccgcacaaacggttcaactgactcacccaagcggaacggccaccatgcgtatgggtctgctgactcacccaagcgcaacgggcactgcgtttttggatcatcagacctcaagccgaatggtaatggccacctgcgctgagcagaactgtttggcctgtgagctccctgtacattcggttgcgatgtgagctccctgcacgttcggtcgaggtctatcgtgaacccactatccgagattgatgtggatcattgggttgacaggtcatacagtatagagccggtggcagaggaattcctgtttgctgtgggtaaagcttatcttctgctttcgtgttttttcttgcttctttcgattatggtgtaggaatgtggtcataatgtattagctgattatcctttccctgctaattggactttattacgcttcattaagtttggctgattactgtttaacggggaaaagttgcacctgtgtacgattatttatttgtacctgtaatatttatggagaactagcctcgccgcaaatagccctgatgaattcagctgcagtttattcccagattggactgttgtttaatgtgaatgtaaatatgatgcctctgcaaacattgagcagat

SEQ ID NO: 5279 - DNA, 4184 bp, Zea mays
agagcttctagttagttttagcgttttagcgttttgtttgtgtgacgtgttgggtttctagtgggctgttttgctagtgcttcttttcttttctttgccctcctctaccctagtgttgttttttcttttcctttccggtgtttgtaagtgtctctttctaataaatttttggtcatggcaatactcttgccgtgtcctttttcaaaaaaaaataatagaccaagcggtggaggagaggtggttttgcattttgctgccgttgctatgctcggtctctagatctcaccatcagtccatcaccattcaccaccgcctgcgcctgcaccttcacctgcacctgcacctacacctgcacctcgactgcatgccaaccgggggctgcctttcccgccgcccaccacgatcatcgtcctggaacaggaatcagaatctcgctgttgtgttgttcacttgtgctgctacagcgacacgcctggatcccgagtcccggcccgattcccgttcccgttcgactccctctgctcatcctcggaaacggattccgccgtcccgtctagcaaacctctctctcttcagccttttgattcccacctctccattcccagcggctataaatccccgcgtcgccgctgcgccaaccccccctggccccctccctctccttcctaacatcttccttcgtcagccgcagatgcgccagcatctctcccacgggcagcaggaggaggagcgagaggcacagtgacagacagagagagagcgcgcgcggggggagcccagcacagcacctacactagctagccaccaccaccaccaccaccgaccgaatcgggtgcgcgcggcgcgctgctcgtcagctccggccggccgcccggccgctttataaagccacccacccagccccgcccgatcgccatcgccatacccccgcctccgtccacggacacacacccgccttgccagccggcaccctcccggcctcccccacctgtgtcctccggcctcgccgccgcaaaacccgccgcgcaggccggttgctccgattgggagtgccaatcggagccaacagcgagggaagcacatgctgccgttcgtcctagagttcctcattgatgtcgcctgtgatcagtgagatcctcctctcggggtttatgatcaactccacactccggcgccgcacccacctggtccagtccttctccgtcgtcttcctctactggttctatgtcttctcatgaactactcgcccccatcatagccacgccccttctctcccactcctcctcctcctctttcccttccatctagtagcatctaccgtcctcctcttctctccgtgtcagtctctgccttcgtcgtcgccgtttcagtcgttccctaaaccttctttagcttgcatgcacttccctactgctgctagcaaagacctttattactagtgtcaattaagttacgaaagaagaagaaagaaagaaaatttcgaggccgagaaaaaagacggctttgatctctcgctagtgtggtgtggtagtgtgtgcttctagtaagtaagcgagccagggatcaagaagcagagagctgctctgtctcttttgtctcttgcaagaatggcttcctccagcgggagcgggagctcgggctccctctcggcggcaacggcggccctggccgccgcggcgggcacggaggaggagctgcgcgcgctcatggagcagcgccgcgcgaagcggatgctgtccaaccgcgagtccgcgcggcggtcgcggatgcgcaagcagcgccacctcgacgagctgaccgcgcaggcggcgcacctgcgccgcgagaacgcgcacgtggccaccgcgctcggcctcaccgcgcagggcctcctcgccgtggacgccgagaacgccgtcctccgcacccaggccgccgagctcgccgcgcgcctcggctccctcaacgacatcctcgcctgcatgaacaccaacgccgtcggcgccgtcgccgtctccctcacagccgccgccgccgccgccgcttcctccgacccctgcctcgccttcgacggcgccaccgccctggacgacctcctcagatcctgccccgagaacatgttccagtaccagctctgctagctccagaccgcgcgaagtcaccatggcagcgcaaaacaccttcttttgttttgttttgtttttgtttttttttcttcttcttcttctggtgtttcaggtttagtaatctgctagtgagatggaagaactgaggtcagatcagacgtggtggtgactagccatgaaagtgaactttactgttactgtactgtgcgatcaactggtgggggtaattagctagctagctagctgctggggctatggttaatgcatgaactgctattagttaccaggtgtaagtgtaactctcgagtcctgctcttgttactgtttgtgtactgactgtgtcactccactactatgtaagaatcagagcagtaagtttactagtgtctctgctgtcaaacaaaggaagtgcaccatataatctacactttaattactcttgcctgtgtgccctgcagcgatcttaacgttaaaaaaaaccctgtcagtttttctctttattttcaatatatctatcttgagcaaggtttatcttttcctgcacctctgaattatggcactattacactgtcagtcgccagagctggctctgcctctctgtgctgctgtctagctgtgagcttcagattttaacagctgctggtacattttttctgatgcccatgggcaaaagtggtgcacaagcatatcctccccgttttaaaactatatttgcatctaggcatattttatgtcgtcaaggtacataatgaaatttatgaacgcgtagaaatgccgaaacattttataatttaagacagggatagcattatctactattcaccggcagaaagctcagcttgatattcttcaaggtagtgggaataatcagagtgacaacagccggtctttttacggagagaatggaataacttggcctcattttcctgtttcacacacatatatatatttctgtggattcggtcgagtacagtatggacggcggccattgagcgtcgagaaagagattctccaaactactctctctgtcctctcccactcgtagacatagtcacagccagccactctgttcccttgttttgttcttcttctttttttttccttgaggggcttgattgtaccagaagaccactttctagttgtcatgggttcatggaccagcagcactgttgcgtgcattggtaccgccagtacaatgatccctgcctgcaagctaatggctgcagcactagtggcagccctcagtgccatctgtgtagctctgctcatctctcagtcccacggcacacagatatttcagttcattgcattccattccattccattcatcaggacacagctcacatcatctctctctctctctcttgggcttggtacccacatggtgcactcactgactctcacacacccacaagcaaatctgatcttccagtggctgtaactggagctgcagaccaccaactactcccccgagtatacgatgcatggtgctcttgtatggcgttggcatgcatgcaatggaatggaatggaatggaccactggcactgctctctgcaaacgcaattggtgcaatggacctgcaatgcctggggctgggaggtagcggctacattgatggagtggaatagagccagacagccagctctctctctctctctctctctcacgcgcacacaggggaggggaggggaggggaggaggggattgctgcacaagccactgcgcaaaggggcgggaatcaaggccaaggacgtggtcacctcccctccttgcagcccaagcctccacctttcctcgtctccacccatccatccacacagagacggaggagaatatgtcgagagccgcccggaatattctccaccgtaccctcgggtctgtctgttcactgtcgacgccgaggcgacgatcatcgatcacttccggtcctgaagatttcagattcatcagtaattaatggttatatgcgaggctgaggcatgcacaaatcaagtcctcctcctgatatggtgaatggtgaatcagtggtacatttttgtcgggttttcttctgcttagtacatgtctctgtttagta

SEQ ID NO: 5280 - DNA, 2554 bp, Zea mays
ggtacccgcgtctcgggccggaaaccgaacacgaccgtcgccgtctctactcccagtcccagctgccaaggtcttcgtcgcctcgtcgggctcgggtcctttgccggcgacgagcgcgtgcacaccagaagaatacagtggaagtggtatgcggttgtaaaacgatttcgattattccaagcggccggcgatggctcggagcccctgcgacctccgcctcctcctcctcgctgcagctgcagctttcatctacatccaagtgcgcctctttgctactcagtcccattatgcggaccgtcttgcggaagcagaaagatctgaaaatcaatgcaccagtcaattaaagtccttgatcgatcaagtcagcatgcagcaggagaagattgtagcattggaagagataaaggtacggcaagatgaagaacgtgcacatctgaggattttgataaaggatcttgaaaaaaggagtgtgcagaagctactagacaagaatgtggttcccgttgctgctgttgtcataatggcttgcaatcgaccagactatttagagagaacagttgaatctatcctgaagtatcagacatcagttgcttcgaagtttccgctttttatatctcaggatggagcaaatggagctgtgaagaataaagctttggaatataaacaaataacatacatgcagcatgtggatcttgaacctgtgcaaactgaaaggccaggagaattgacagcatattacaagattgctaaacattataagtgggccttggacaacctattcattaaacataattttgctcgagtaatcattctagaagatgacatggagattgccccggattttttcgactacttcgaggctgcagctaaactacttgataatgacaagacgattatggctgtttcgtcttggaatgacaatgggcagaagcagtttgttaacgacccaaaagctctttaccgctcagatttctttcctgggcttggatggatgttaacaaagtccacttggattgaattgtcaccaaagtggcctaaagcttattgggatgattgggtgaggctaaaggaggtacatggacatcggcaattcatacgcccggaaatttgtagaacatacaattttggcaagcatggatcaagcttgggacagttcttcgagcaatacttggagcccattaagttaaacgatgttcaaatcgattggaattctgaggatctgagctaccttagggaggataagttttcaaccaaatttggaaaagaggtggctagtgccactcctctccgtggatcagatgctgtgttgaaagcccacaatatggctgaggatgtaaggatccaatacgacgaccaagaaggtttcgagcagatagctcgtcaatttggaatattcgaagaatggaaggatggcatcccaagaacggcttacaaaggagtggtggtcttccggtacaacagtagtcaaaggcgaatatttctcgtcagcccagattctcttcgtcagctgggggtgtagcatgttgagaaggtagatttttacccttggaatggcaaatatcatggaattgcttaactggtttctgtgagcatggaggaaccgggatgcatggtgaagaaattttttttgagaagtgattgtgttgacccaaggtactgagtagtagaagcatgggcttggtttataggacatttgcaagatataatacatcgttgttatatctttctccgcatccggaaatgtttagtcagtatgggacttgttatccttgagtgtatttagggtttacacgatgcagttgcatgcgctcaaaagagtgtagcaggagctcactagctgacctgacgctcgatcctttttggtagaagaaaggtgtatctttatgaccaaatttttcttattgggcatcttggaatattaagatggaaggaaatcttgtgcattcgtttgttgtactgttttgtggtgacttcgcagatgtgcgacgagatgggagtgtaagcatccaatcaattccatcgagtttattgagctgtcttgttctgaatatgcagtgcgaacctgagtggttgatttggtttgtggtgcgcaagcttttcattcacctactaaaaccttggatggctcgtgtatacatatagttatatatatgcaacattctgaaattcttttttaagtttttggtttgtagaggacgggtgggagttcatttcatccaaatgcatgggactggttttcctagttgagacgggatttgagtcaaaattcaaatccccgttggttagtttctacgtatgttttttttcttttttatgtcgagcagtgtctggcattattctaagggtccattagccgtccgtgtatgcctttggagcttccaatgcgcattgccgaaagacactagtttcagagtgcaggtgtgcccagccatgccgcagcccaattgcattattagcatgggagaagaaaaagaaaaaaactaacaaagatgaagactagatacaggagtttctctctaaacatcaggtttcagctctgacaactatccggggg

SEQ ID NO: 5281 - DNA, 2347 bp, Zea mays
aataaaaaggggggaagagcattttcccttttttttgctcccctcccccctcgcttctcccgaatttgatgcttaaaccctcgccgggaggaggaggactccacgcgcgagcccgcccgcgccacctaccgccgcgcccggatccccgccatggccgccgcgccgcaccgggcccaggtccccgctgatagcatgactccgctgcagacggggcctgtacttgagaataacccctccaagagtgcaaacgccaaggaccagagaatgtgactacaggcaatgcacggggcgctagctccttgagaccgccaaacggcccaccagagaaggctagctctgtgggaaaagctggagagcaaccttatctctaccagcaaaatgtgtatgcaccgcagccacaaccactctattcactagtccccccccccccccccggacaatgggaggaatatccccattatgtgaatatggaggggctccattccgtatctcccggaatctacaatgacaaccagtccctcatgctatctgctggatatgcaaacaacccccaaatgatgtatggagcatattctcctgtttccactgctggagatggccaacaatacttccctgtgcactattccttctcaaatccttactatcaaccaccagcttctcctagcatgggatattcaaactccgcaactggaatgtcccaaggagaccctatgctgcagcaagagtatttccttcctgatggccttctatattcacccacaccagggtatcatcaaccattcagctcatttgacagagcactgacacagccaaataatgctcctgggttgtttggtcaagggagtctaccactggcttctggaatgcatcatggatcgatgtatggtcctggatcctacaagggacgccagtatggtagcaaatttggtggcactactccaagttggagttctgctggccgcagatttggtactttcgacttgagtggcaatcaacaaagggggagcatgtcatttggtagtcataatggctctctggagtttatgaatgagcaaaaccgtgggccacgtgctacaaaaccaaagatacaagacacagagaactcaggagatgagaaaagcgagaaaactgttcttctaattgatagtgaactgtacaatcgctctgattttatcactgagtacaaggatgccaaattctttgtaataaagtcctacaccgaggaccatgtacataggagcattaagtataatgtttgggctagcacagccagcggaaacaggaagctggattctgcttaccgtgcggccagagagaaagaagagcattgccctattttcttgtttttctcggttaatggaagtggccaattctgtggcgtggctgagatgattggacctgtcgattttgacagaagtgttaattactggcagcaggataagtggagtggccagttcccagtgaagtggcacataattaaggatgtaccgaacaaccttctgcggcacatcattcttgagaacaatgacaataagcctgtcacaaatagcagggacacccaggaggtgaagctggaacagggcctccagatgctaacgatcttcaagagccatgaggctgagacaacaattgtggaagatttcgacttctatgagcagcgggagaaagccttgcaggagaacagacgtcaacagcatgctgccagcaccgatactcagaaactggtggataccaaggctcaagatgctgtggccgacatatcagatgcatttgccaaggccgtccagttgaagaatactgagaacagtgggacaacccccaaaactgagggtgcttcagctgaaaagggttccgctgccacagccaaggttgaaggaagtgcaaacctgaacacaggccctgtggaggaaagcagttgattcgtttcccttctatctgcaaatttggagcagcagatgaatagcatggtgcgatgtgaaggtcagaaaggggaaggtgtgttgaatatggtcgtgcccccgtcagttgtacaacatcataggctttcttttatggccatttaggttataaaatttcaatatcatagttccaaaattgttgttcccggttgtcttcgttcctgttctgttttgcttccgtcttccatgttcctgtgtcgtaccatgaatgatggttcaatttagtgggtttaggcataagaagctgcagaattatgccgcggtaaagttgcattttctgcagctgaatgtgatactctgcactgtctccatccttgtgtaatttcagagatcctttctctaacagcaacggcgacagcaacgcctgtacactgctgccctcctcgtgc

SEQ ID NO: 5282 - DNA, 3635 bp, Zea mays
  misc_feature (2002)..(2002): n is a, c, g, or t
cccgtggctttgccttcgtgactatggatactcttgaaggtgcaagacgctccatcaagtatctgcaccgcactgtacttgaaggtcgcctggtcactgtagagaaggttagatgctgactgtactgattcattccattatgcatttttctattgtattttttgttgaatagtgctagttttgtcatgttatcgttgtatagtaatgtcaagtagtctaatactagcagtagtacagttaaaaatttaaagctactatacggtcatgcatgttttttgtcttatgcttgtccctccccttcccactttagccttgaaatcactgatgtcttagtaacataaatgcattaatcttgtgcactggaaattatattccattacattaagggggtgtttgaatgcactagagctaatagttagttggctaaaaaattgctagtgaaattagctacctaactattagctaatttcctaaaaatagctaatagctgaactattagctagactgtttgaatgtcttcagctaattttagcagctaactattagctctagtgcattcaaacaccctctcccacgcctctgatgctatgctctgttcagtttaaaactctggtgaaggtccttgaggtgaggtatgttatgacttatgagtagaagattacaaatatgctctttccctatgatggaagagtatattctgtaacagacaagcctggaaaccccactcaggtgaaatgtgccagagtaaattgaaaggggatcatttatgatgtgttctgatgcaatcctaatgtggtgaatggggaaaacctcttctgtggctcttcaactggggtcttaactctcatctcgtgctgacttcctgaccttccagtttaacatggtgctgggctgcctctacgtcaacctggttggtccaggctgtgcagtctccaaccatggttgtctccaaaggatgtgcagctgacgtgatggtgcttatcaccacaccctcagagctcatcaccacttgccgtcttcacctcgctcaccgacaatgcatacatgctacatcaacacgacggctgtcgccatagagcgatcttggagtcttgttgtgcatcgcgtcaccaccatcgccaccgcaacttctaccacaaccgccatcgtcaacatcacgctcgtgatccaacaggctctacgatttgtctgcttcgactaagcttacatggtgcatgctgctgccatgtcacgacaccaaccaccaagtctgatgcgaacttcatcgaccagtatcttgatttgatggacatcacgaggcgcataatctggcgcttccttggaccatggctacaccgaccacggaacaagtgcacaaaagtcatctttggtttagttggcatgcaacgtaaagtttaatctacctatatcacaagattttgatcaagagttgacaagcttaatggaccatgactatttttcaccaaaagggcaaagtttagtttcattatcaattatattaaccactctgttcaaatttaagatcgaattgggttcttcctttatttagcatacttgaagttcattgcttgtttcattcgtaccaactaatacatttgttcacgattttattccaggctaaaagaactcgtgaaaggacccctactcctggaaaatactgtggtcgaagaggtaggatctcaaagttgagccaattttgcacctccacatgatatgaccacaacgctttctgtattaagcatcgtttgacttgcttctttatgtgttgttcagcttgcatacattgttgttgaatggatatcactttatttgtttgcagttgtcagatgtgctatgctgtttttttaatacataaacatgaacttagtctaaatattctgtgccactcatagggtatttgtgtgcttatttgttttatatattgatctttaatattctaatgattgacctcgatgggggtgttatgtttagttgtttattacaacacataaacatgaactcngtctctaaatattttgtgccactcataggtttgcttatttgttgttttagtgatcttaatattctaattatcggccttaatggggtgttttgtttctacaacctgtgattataattgtagcttttatggtgttctctatttttagctggcataattccacactattgaagccctggtagacatctatggtctaggtggtgttctatatttttagccggcataattccacactatcaaagatttgagcacacatctatggtctaggtcattgttttccttgattgaaatcacactttcgaagtagatcacacgcgtagccatgggaaaattgtgacagttattatgtgcaaatttggttgcatatatctttttataggcttgtgatccacgtgtgctcttgaagcatttgcaagacgctccatcgagtttctgcaccgcactgtacttgaaggtcgcctggtcactgagaaagctaaaagaactcgtgaaaggacccctactcctggaaaatactgtggtcgaagaggaggatctcaaaggagcccatcaccttaccgccctcgcagaagggagcgttcgcgctcaagggaacgcagaagggagcgttcgcgttcaagggatcgaagggagcggtctcgctcaagggatcgaagggagcggtctcgctcaagggaacgccgaagggagcggtctcgttcaagggaccgcagggagaggtctcgctcaagggaccgccggagggagcgctcacgctcaagggaccgcagaagggagcgctcacgctcaagggaccggaggggcagttcaccccatggcagaaggcatagagatcggtccaggtcacccaccagcaatgggaaccataaggcagactaggaagcgcttttatggacttgtcgttgattgcgtgaacaaaggaacttgtaacactacctataaactggtcagactgagacggttagcatggatttttagtagtgttgctgtattttgttgtttcatacaagtactctattctgttagctttcggatcgaaatgtcggatgatgatggttgttattgttctggaaatcgtagacatgtcctccagaatacctatgaaactatggcatactcgtgtgtttgcttaaggttgccgtcggctgcgccgaccgcaacgttgacacgttgcacggtagatggatgcctctgttcaatctcgggtggtctccggactatttttagtccctccattttatttcactatagtctataaattgcaaaatatggaaactataactctattttatttttcatatttgacaatttagtgactaaagtggaataaattggagggactaaaaattagtctctaaaaccaaacacccctaagttgcctaagttttcaatgtttcattagccatcagtaggctcgagtcatgcggcagaggcgatccgtagtactacttgcatacttattggaccaggaaggaaatgttacgtgcgttacggttgaatttccagtcaaactcggaccaactttccagggtcagaatcaaacgggcgtactgtttgtactcgaggattccattatacaatggcacactcatgccgtgaaaaccatggaaactgcccacaagcgatatgtcaaaca

SEQ ID NO: 5283 - DNA, 1538 bp, Zea mays
cctaatcaaaaaaaaatccgcgccatggtcccccatcccgtccctcccctagtcccctccgacctcttctaaaaatcctggtggctggctctcgttgtcctcaagcagtcaagctcctcctcctcctccccccagtccctcccaggctcccaccccgccttgctcgcagcctccccaaaaccctagccctagccctagccctagccctagctctcccacacccgcactgggagatggacggcggcggcacgcaccgcacgccggaagacgtgttccgggatttccgcgcgcggcgggctggtatgatcaaagcgctcaccaccgacgtggagaagttctaccagcagtgtgacccagagaaagagaatctgtgtttgtatggtcttcccaatgaaacatgggaagtgaacctgcctgcagaggaggttcctcctgaacttccagagccagctctgggaattaattttgctcgtgacgggatggatgaaaaagattggctgtcactagtcgcggtgcacagtgatgcttggttgctggctgtggccttttacttcggtgcaagatttggttttgacaaagaatccaggaagcgcctttttgtcatgattaataacctccctacaatatatgaagttgtcacgggaactgccaagaagcaaaccaaggagaaaactcccaaaagcagcagcaagagcaataaagctggcccaaaaccgccacgccagccagaacccaactcaaggggttcgaagatgccacctccgaaggatgaggatgacagcggaggcgaggaagaggaggaagaggaagatcacgaaaacacgctgtgtggttcttgtggtgacaactacggacaggatgagttctggatatgctgtgatgcgtgcgagacttggttccatggcaagtgtgtcaagatcactcctgccaaggccgaacacatcaagcactacaagtgtccgaactgcagcggtagtggcaagagagcccgagcatgatgatgctggatatatccatctctcatgcctgacttgatgtaaaacacccacatggggaccgaatgcccgatggctgttgctttcagtgtaggaccagctgtagggtcttgatgtgctgtttgctgtagtatgtcaaagacgttctagatctattgttagtaactagcaactaattgtagtagcctgtatttcttcaatcttctcccagggcgcctgtgctgaactcaaactgttttagatctaagttgtgcattatgtatcactcatgttagtttgttaaaaaatgtgttagcattcgtatgaaacgccaaccatgtttacaaattaattaacttcaagtctatttgcgcgcaccggtggtttagtctccccagttgcagtttcccaagtatgttgtatgccctatcctctctagattctctagattttgagacgtattgctgcgtcatctttccatccagcagcgtatctttgcatactttctggggtatggtgtatgtaaaccagaacgtagtggggtttgacttttgctgtgctgca

SEQ ID NO: 5284 - DNA, 1306 bp, Zea mays
  misc_feature (2)..(2): n is a, c, g, or t
  misc_feature (5)..(5): n is a, c, g, or t
  misc_feature (8)..(8): n is a, c, g, or t
gnaanagnatggtgctagtcttcctgttggtgcaggggtgggaaggaagaccggttggctctcaggtgggtgagctcatgctcagatgatgcgaagaccgtctttgccgctgtgaccgtgccactgctctataaatcatccctagctgagccgaggtccatcccatccaggtcaatgttcccaacatttgatgttggtgatcggatccttgctgagaagatttcgtacattttccgggaaccggaaattcgggacattgtgatctttcgggcacctccagtccttcaggcattgggctacagcgcaggtgatgtgtttatcaagagagttgtggctaagggtggggacatcgttgaagtaagcttttatcccaatggtacgtgatggtaacttgattgttaatggagtagttcaggaggaagaatttgtgttggaaccagccgactacgaaatggatccgctgactgtgcctgaaggctatgtctttgtactgggggataacagaaacaacagctttgattcacataactggggtccacttccagttaagaacatcctcgggagatctgtgctccgatactggccaccatctaggataacagatacaatatatcagcatgacatggtgcagcacacagctgttgcatcctgataatacattgtggcaataccacgtggtgcacgccaatttctcctttccctgcatagctttattgacaattgatatgcttagccgtggggttctttatttatttgttgtagccttgcctcaaatgtcgattgggcagcttggctgacagattagtttttttttccctccctacgggcagatgcttgtttaaagacagcaattcttgtactccgtagctaagaatgaatgccatataaatgttgcagtagataagcatcaaggagtgtaggatgaggatggcagttcttttgttttatgagatgagatggtgctctaaacttacgtaaaggaaatacgaagcatagaagagtgcccaagttgtgttatttatttttttcattccttgatcttggatcaaagattcaaggcaaagtcagcctggtgcaaaggttttggttgaatccttgtatcctgccagataaggttttttgatggtgcaattttggattagcatttgccctagtatttagtgttttttagttctgtattcatttatgattaatacaactttgcgagcatagttctgtttggcctgctttgttcaatcgcagtgcgggttcaatactacgttgcctgatgttattgtctgttattttctttgtaaaaaaaaaaaaa

SEQ ID NO: 5285 - DNA, 2001 bp, Zea mays
aagagacagagagggggagtggtccgaggtcaataggatataactccaggactcctctccatcagaatcagagacgagtcgagtgagggggcagaggccacaaaacagagagtacccaaacgatcgatctgtgcatctccccgtccgtcccgcaaccatctaattcagaagcagacatcaatggcgagcaacggctgcaacggcaacggcaacggcaacggcaacggcaaggcggctccggcgggtgtggtggtaccggagatcaagttcaccaagctcttcatcaacggcgagttcgtcgacgccgcctccggcaagacattcgataccagggacccacggaccggcgacgtgctggcccacgtagcagaggcagacaaagctgatgtggacctggcggtgaagtccgcccgggacgccttcgagcacggcaagtggccccgcatgtcaggctacgagcgcgggcggatcatgagcaagctggcggacctggtggagcagcacacggaggagctggcggcgctggacggtgccgacgccgggaagctgctgctgctgggcaagatcatcgacatccccgcggccacgcagatgctgcgctactacgccggcgccgccgacaagatccacggcgacgtcctgcgcgtctccggcaggtaccagggctacacgctcaaggagcctatcggcgtcgtgggcgtcatcatcccctggaacttccccaccatgatgttcttcctcaaggtcagcccggcgctcgccgcgggctgcaccgtcgtcgtcaagcccgccgagcagacgccgctttccgcgctctactacgcgcacctcgcaaagatggccggcgtccccgacggagtgatcaacgtcgtccccgggttcggccccaccgccggcgccgcgctcgcctcccacatggacgtcgacagcgtggccttcaccggctccacagaggtgggtcgcctcatcatggagtcggccgcgcggagcaacctcaagacggtctcgctggagctcggcggcaagtcgccgctcatcatcttcgacgacgccgacgtcgacatggccgttaacctgtcgaggcttgccgtcttcttcaacaagggagaggtttgcgtggcgggatcgcgcgtgtacgtgcaggaagggatctatgacgagttcgtcaagaaggccgtggaggccgcgcggagctggaaggttggagacccgttcgatgtcaccagcaacatgggccctcaggttgacaaggaccagtttgagagggtcctaaagtacattgagcatggcaagagcgagggagcgactctgctcaccggcggcaagcctgccgccgacaaagggtactacattgagcccaccatctttgtcgatgtcactgaggacatgaagatcgcgcaggaagagatcttcggccccgtcatgtccctcatgaagttcaagacggttgatgaggtgatcgagaaggccaactgcaccaggtacgggctcgccgccgggatcgtgaccaagagcctggacgtcgccaaccgggtgtcccggtcggtgcgcgccggcaccgtgtgggtgaactgctacttcgccttcgacccggacgcgcccttcggcgggtacaagatgagcggcttcggccgggaccaggggctggcagccatggacaagtacctgcaggtcaagagcgtcatcaccgcgctcccggactcgccatggtactgagttgagccagggaccgatggaaccccatcgatctcttcttgtgcagtgtacatgcgtcatgcgtgcgtgctcacacagctgggttgctgctttgtgcttgtgttcgtctctggtttgtggctcatgtgtgttagtctgcaccctatccttctgtacgtagctgccggacatgcaaatagtatgttaagtacaccatataaactcttgttttataaattcaagtttagcttggagccttcactccttcagccttggacaaaaaaaaaaacaaataagcggaaaacc

SEQ ID NO: 5286 - DNA, 1304 bp, Zea mays
  misc_feature (1278)..(1302): n is a, c, g, or t
ctagttctagaatcgcgaggccgcccttttttttttttttttttttttttttagaaaaacccaaagtgatactccctctatttttatttatttggcgttcccaccacgaaatgttatcttgctctagtgcaactgtcttgtatgaaacatgatttaaaacccttagtcattgatacatataaaaatgcactcttgaattataggctaataataataggcattaccaagggtactccgaccatgaaattgccacttccaattcagcgccattttctccaacaagtcgttccgtgtgctggccgttggtcgcaggattgaactcaaggacccctccaacaatttcatcgccggaacagcgatgcaggtcaagctcaatcgtcagcggcatgtgcagcggcacggcgagcgcttccctcgccaactgaatcagcccccccggtcgcacgctcactccattgtcaccctctttgtagaagagcacgcagccgacgtcgaacagcttgctgcgagcaacgatcctcccgagaatggcggtggcgtcttcttctccagctttggacaccggcaggcgagcaagtttgacggcgacccggccttggacgccgttgctcaggacggcatagatcacttcagcggggccatagcccgtttggacagtctcgactatggccctgttgtagttggagaagtcgtcgccgatgcagtcgcagattatcctcccgatgtcctcgtcgtcctcagcggcttctccggcttgcgggctgccatcatggaggtagagggtgaaggcaattggactgtatgccgaggtggccaatgatggcccagttagcacgaggttaccctggctgtcgcaggtttgcttcgaggtgtcttcttcctcttccagtggactccagctgtaaatgaaatcgctgcagcagtggccgccgtagaaagagatgatgccacggggcggcgggtctcctccggcggtggcggggatgcgcacggcgaacacctccgccatgtcgcggccatgtctgggcagctcagcgtacgccagcagttgctcgtcggttggggcgtcgctgtagccggtggcggccgccatgtcgccgaggaagagaacgcgattggggactgggaagtgggaagagaagacagggatcgattgggccaaaatgtgatttttctagtcgctcgcccccctcagctttcctgtgccttggaggagtggaggactggctgacgaaggctttggcgatggcgtttagggtttaggatctacggaggggnnnnnnnnnnnnnnnnnnnnnnnnntt

SEQ ID NO: 5287 - DNA, 2269 bp, Zea mays
  misc_feature (2212)..(2216): n is a, c, g, or t
attgggacctcgaggccggatcgaccaattcatccaatagtggatactttgtctccaagtctcaaaacccaattcgacccacttggaaccggccttgttccccgttggatccagcctaataaaattccccattccaacacacacagatctcgcatcccggcagtggcgacgaatctcgcggggcggaggtggtggcgcgacagaggcggtgtcgactccgacgaactcgcagccaccggtggatacgcaccagcagcaccggcgcactccaccgacgttcatatttaaggacttggtttggatagttctactcgtcaacaaaagtgattaaaaatggtggttcttgcagcttcaatcgtttcaaagtcggggaaagcacttgtttcaagacagtttgttgacatgtctcgcataagaattgaaggattacttgctgcgttcccgaaactggttggaactgggaaacagcacacttatgttgaaactgaaaatgtgcgttatgtttatcaacctattgaaggattatatcttctacttatcacaaacaagcagagcaatattcttgaagatctggacacattgaggcttctctccaagcttgtgcctgaatactccccttccttggatgaggacggtatttgtaaaacagcatttgagattatatttgcttttgatgaagccatctctcttgggaacaaggaaaatgtgacagtgcaacaagttaaacaatattgtgagatggagagccatgaagagaaggcacacaagctgatgatgcaagccaaaatcaacgaaaccaaggatctcatgaagaagagggctaatgaacttgacaaaatgaggatggaaagaggcaagcttgacaaaggaggatactcatcaatatctggtccacgcgtgattgaaaaaacgtttagtgacatgagcatcagtggttctggatttggtagtggttctggattaggtggactgagcactgatatggactcatttgccagcaagcccaaaggtcgtccatctacagcagctactgcacctggtaaaggttttggtatgaaattaggcaagacacagaagacaaatcaattcctcgagtctttgaaagctgaaggagaagtcattttggaggatgtacaaccaagtgcagtttctacaagatcatctgctcttccaccaagtgaccctgtcacagtgaacatagaagagaagctcaatgttgttgttaaaagagatggtggtattagtaactttgatgttcaaggaacacttgctcttcaggttcttaatgatactgatgggttcatccatttgcagattgaaagccaagatatgcctgggcttagcttcaaaacacacccaaatatcaataaggatttgtttaacagtcagcaaattttgggagcaaaagatccaaacaggccctttccgagtggtcaaaatgaaactcctctggtgaaatggagaatccaggggatggatgagtcgtctttacctctgtcagtcaattgctggccgtcagtatctggaaatgaaacctatgtgaacattgaatatgaagcttctgagatgtttgatctgcacaacgttgtcatatctatacctctgccagcacttcgggaggctccgagtgttagacagatcgatggagagtggaagttcgactcaagaaactctgtgttggaatggtctattctccttatcgatcagtcgaatcgcagtggttccatggaatttgttgttcccccagctgacccatcatcgtttttccccatctccgttggattttctgcatcgagtactttcagtgatctgaaggttactggaattcttcctctgaaggaaggcaaccctcccaagttttctcagcgggctcgtttgctcactgctaactaccaagttgtttaacgcttgtaccgcgagtgttggtccacttgaatgctccaatagcagatgttattgccgtggacttatgcaagccatggcacgggagattattttgtgtttggaaaatttcttgactatgcgcttctcattgttatagcatattgcacaaatgttgttctaatgtattgccaccagagaaataagtaatgttcttgcattttgttggcatgcaaaaaaaaaaaaaaaaaaagcaaccgcccttggttttgtaaggacgatgttatcgtctgggcttgtgtaatgtgatctgctggtggaaaagcatttnnnnnggaacccttatcccttttataataactaacaaggaacaaggtcatttcccttt

SEQ ID NO: 5288 - DNA, 1188 bp, Zea mays
tatgtcaatttcaagaatattacattagcatagccataaaatactcgtcgtaactgaattcatgtacagacacaagaatagccacaaataaacaccaatccaaacaccgaattctcatagacctacaaggtcatagccaaacccacaagaagcactttttatgttaagttcacatctttaattgagttctcacaatcacttcataatatgtagctttcctctacacaagaaacaattgcaatggctgctgccccccggaccccggtgacaggcacaaacatgcacagcaaaaaacactatgtgcacatcatgccttaccttatgcaagttggtagggtgaaaccatggcacacgaagactagaacgacatatattattaccaggaggagaagtatcaatgcggccgtgagtttgacatttctccaccaaacagtgtttctgaaccgccgagcttgtctcttgaatcgaactgtatttccttgcatatttgcagtcttgtcaaccagcagttccaaacgatcacctctttcaagaaccttatcaatgttatcaatcataacactacggacctgattgatttcacctctcatgcggtttattctatctgcactagggtcatttgaatagtagtccatttgctggctcaagacccttgagaattcatcattcattgcatatgcaagagcggttagcgcagcccggccatatgtcttgacaaaccttccatgaatatcctccaaaaatgcgaagggaatccgtcttccggcggcgtcgtcggccatgcagagcgcggtgatgccgtcggtgcgcttggcgtggaagacgtagcggtcctgcgtgtaggagacgtggctgtcggcgccgccgtcggggaggcgctcgaggacctggcgcgcgatagcgcccgcgttggtggctgccgcgctgtgctccgccagcaccaccgtgccgcgcgccaccagcgcgtacaggattgccatctcacctgttcccttggagccgatcccctcccctcctctcctctcccccggcggcggcgtctgccgtgtggactaggagaggacggagaaaaggggagaggtttgggctcggttgggccaagatggagacggaggaggaaggacacgcccgagctggttgcctgcctctctgccagcctattgtgttgggggcccggccggcctcgag

SEQ ID NO: 5289 - DNA, 2945 bp, Zea mays
  misc_feature (1845)..(1845): n is a, c, g, or t
tttttcctggaggaggagagggtggtcaataagatcattagcagtgtgccaaagcatttgaagcaaattatggtagcgataaagaccctccttgacgtgtcactcattgtcgaaggccttataagtcaactcaaggcgacgaaggatgcaaacaaggaaccaccaacgtcgctgcagcaagttgaaatattgtacctcacggagaaagagtgtgatgtgcgacgaaagaagcatgaagcataaaaccactctagtggtggcaatatggagggtgtccctgttctaggggacagcgcatccaacaaggccatgaaagcaagaacaataaagcagaaagtctaaacattgtcgcattttaatagttgattctactgaccatgagcactcgagtctcgacggggttgcaaactgacaaaactagttgcaagccccagtacaatttaccaaatatcatcgtctaataattagccagaaaccatatggttaaagcttattcagcctcggcaacaaacaggtgtcaaaaggcaacaaagggttctgttgtagtgacaagaaaatatctcctataggaacccgtcataccaaggttcactgcatacataattcatcacaacttgctgtacataattgtttgaatcaaccatctagaccgtctaccatcaaataaaaaaaaactccctaatcattgtgcagttgaaagcaatagttgctagtatcggagtaacggaagggatggcaatgttgctgtgaatctgaaagttgctgactacgtatatatgcacattcatacatcaaaacctggcatcgcaaactgtgacgcaaatgcctcaacctgatttcggagttctataacatcattattgttctgtaggcctcttagaaactccttttgcactttgccatgttctttcagaacattgttagcaatttgagtagcccttatgaggaagtctgcaatcacctcgaagtcctcttctaagcaacctctagtagtcattgcaggtgttccaatccgcacaccacctggcgatatcgagccattatctccataaattggtgtcttgttgacagatatgtggcatgcctcacaaaccttctcgaagatcttgccagtcaagccaagagttctgaggtcccaaagtaccaagtgattatctgtgccacctgtaaccaatctgcattttcttctgatcaaagctgatgccaaagcctgagcatttttcttgacttgttgaatgtatgctttatattcagaagttgctacctgcttcagagttatagccaagccagcaatatgattattatggggccctccttgcattgaagggaaaacaccaaaatttatcctatcctcgaagtcatattcattctcatctccttgagaaaaagatccagctcgtttccttaaatttttccctttcctgaagaatattataccacctctagggcccctaagattcttgtgagtagttgacgtaacaacatcacagtagtcgaaagggctacggcattcctttgctgcgacaagcccactgatatgtgccatgtcgcaaagaagcaccgcaccacacttatcagcaatcaatctcatccgtgcaaagtcccactctctggggtaagagctcccaccacagatgagaattttagggtggaaatccattgctctttcttcaagcttgtcgtaatcaatatacccagtctgtgggttcaccttgtacgacatgctctcgaagaaaatagaggcacctgacaccttcttgccactgggcgtgtagtaaccatggctaacatggccgcccgacggtggctccagccccatgatgcggtccttgggttgaaggagcnccagtgtagacagccaagttggcagacgtgcacgagtagggctgcacgttgacgccccagcaggcagggtcgagaccgaaggcggtgagagcgcgctcatggcagagccgttcgatggcgtcgatgtgctgattcccgccgtagtagcgagcacccggggccccctcggagtacttgttagtgaggtggctgccgagtgcatcgagcaccgcgcggcagacgaagttttccgacgctatgagctcgatgcctcgcacctggcggtccaactcctgctccatcagcgagtgcacgtccgggtcggcctccgccagcgactgattgccccaggcgcggaccgcggcgcggcgggtctccagatctgcgccgctgccctcccccgtcgcctgtcgcttggcagggcgaagcgccgcggacgtggacgagcaggatgacgtctctccgcccccgccgccgttgccggcgcggcgcgggcgcttgacgaagagggagtgcccgaggagggagaagtgctggtcgcccccgtcctcgtcatccctctccgcgtcggcctctccggccacgacgcgctccggcttcggctcctccgcgtcgtcgaacaagcgcagcggcgcggctaccgcgtgcctgcgagcgtgggcgtgggcgtgaccgtgagagtggagcccgagcgagaggtccgacgatgtgggccgcgagagatccatagcttaccaattctcgaaccgatcagcgagaaatcgcgaaccctaaagagctacgcgtcttcaacaacggcagcaactaacgcgacagcagcagcggaggtgggcgacgcagggaggaagcagagtcagcagcggtggctactagaggcgacgcggcggcggagaaaaccatgggccttagggatcgatcggggtatggggtccggatgcagagacgacgcggtggaattggagatctcgtggaattggggagccggaggcaagcagcggagcagaggggaatgaacgggcgccgtgctccaattgatgaaggggagggctggtggtggtgtcgtgtgacgtggtcagatactcagatgcggttcgatgggaacccgggataatgggacgatc

SEQ ID NO: 5290 - DNA, 2715 bp, Zea mays
  misc_feature (16)..(23): n is a, c, g, or t
  misc_feature (2170)..(2196): n is a, c, g, or t
  misc_feature (2289)..(2295): n is a, c, g, or t
  misc_feature (2607)..(2607): n is a, c, g, or t
gccggccgggccgggnnnnnnnngccggccgggtcggcgctgcggagagtgtctcgtgctgctgcttccgctgcagtaaaatacggggaagaggaggggagggagacgcggccgctgcctgccgcacatgctttaagtcccactccccacctccccagatctccgccctcctccccaccgcccccattcctcccctcggccgcaaccgtagccgccgcactacggagcaagatcgtcgggtagacggacgggcgggcgggcgggcgcggctctgtatctatctgtcggtgggagaccgcgtgtgtcggttaggcggcgggtggcaaggaagaatggcggcgagcggcagatccgtcgcgtgctgtgccgccgcgctgctcgcggccgcgttgctcctctccgcaccgactgcaacagaggcttatgattcgctggatccaaatggcaacatcaccataaaatgggatatcatgcagtggactcctgatggatatgtcgctgttgtcacaatgtttaattatcaacaatttcggcatatcggcgcacctggttggcagcttgggtggacatgggcaaagaaggaggttatatggtcaatggttggggctcagaccactgaacagggcgactgctcaaagttcaagagcagcccaccccattgctgcaagaaagatccaacaattgtcgatttacttccaggcactccatacaacatgcaaattgccaattgctgcaaggcaggagttgtaaatacctttaaccaggacccagcaaatgctgcttcctccttccagatcagtgttggtcttgctggaactaccaataaaactgttaaggtgcccaggaacttcactcttaagactccaggccctgggtacacatgtgggcgtgccattgttggcaggcctacgaagtttttcaccgcggacgggcgcagggcaacccaagctctaatgacatggaatgtgacctgcacatattcccaatttcttgctcagaagactccatcctgctgtgtatctctctcatcgttttataatgacacaattgtgaactgcccaacatgctcatgtggctgccagaacccaagtgggtcaaactgtgtgaatgaggattcacctaatctacaagctgcaattgatggtcctggcaaatggactggtcagccccttgtacaatgcacttcccacatgtgcccgataagaatccactggcatgtgaagctcaactacaaggattactggagagtgaaaatcactatcacaaacttcaacttccgcatgaattacacgcagtggaacttagtagcccagcatccaaactttgataatatcactcagttgttcagcttcaactacaaaccacttactccatatggtggtggcataaatgatacggcaatgttctggggtgtaaaattctacaatgatctgctgatgcaagccggcaaacttgggaatgtgcaatcagagctgcttctccgcaaggactcccggactttcactttcgaaaagggatgggccttcccacgccgagtttacttcaatggtgataattgtgtcatgccatctcctgaaaattatccatggctgccgaatgcaagccctctaacaaaaccattggcactcccattcttggtattctgggttgccttggctgctctgttggcttatgcatgattagtgggatcaagaggtttagcaagtttcaagttgatgtcagattccatgaggtgcactgcaacaagtcatttgttcattcaattccatggttgcacagaaaagatgaggcgatgccaagaaaaagtcgatatgtctatgtgtttaagttaaagggccaaaatgtatttcttgtttggtatataacagccctacaacactttggtgaacttagttactgcagattaggtaattacagttgcaccttttgtattttatagcaaacccagaatttttcattggattctacgactgcccctcttgtagtaaatgcaagcttccctgacccctgtttactaaaaaaataggggcttgcccgggatcgacccaattttcagtgcaggactccaacttcatcaggagtccaagcccacatgggcctggtgctatgacaagaaaaggcgctaatactgttgatagacaaaattctgagatttcttattatgctgatnnnnnnnnnnnnnnnnnnnnnnnnnnnactaaaaggggtacatttcgtcacaaatttctaaggatgctgctgccgttctggtccagtgcactgccaacgctaccagtcacagcaccatcnnnnnnngagagtgatgctctagaggggagtcgatcacgccatcagagatcatcaagaggtttagcaagtttcaagttgatgtcagattccatgaggtgcactgcaacaagtcatttgttcattcaattccatggttgcacagaaaagatgaggcgatgccaagaaaaagtcgatatgtctatgtgtttaagttaaagggccaaaatgtatttcttgtttggtatataacagccctacaacactttggtgaacttagttactgcagattaggtaattacagttgcaccttttgtattttatagcaaacccagacttctncattggattctatgactgcccctcttgtagtaaacgcaaggcttcactggtactcctgtttaaagattggtcaaatagaagagacgacggtgattgtctgattgaggt

SEQ ID NO: 5291 - DNA, 1827 bp, Zea mays
  misc_feature (1799)..(1799): n is a, c, g, or t
tggtttctagttaaaaatgcatttggcagagaaatatatatagttgttgtaactcagctgtttgaattgttcttattattttaaagagatctctgctctatatagtttgggagcttatgccagggattaaatcatatatgccacttaatctattgaaacaatcctgtgtcatcaacaaggtggtctggagatacgtgatacattgtatatatggcatgatgcaaacattcagtgtcacataagaatattgaagaaggtttaaaatgcctctatttcattgagtcagaagtatcatgtgctactccacattagagagtagcatgaaataaatagacagaagttcatagagaagggatgttctcgttttcccttgggatgaggcgagggtttgcatgctactgttctgttgattatgccttgttctctggttctgttcaatgtaggacttataactactgtcactttcaaccgtctacttatattttgcttccatcttattcagagctttccacaaatacccatttcattttctttgttggcaattagttttgacttgaccatgttattcttctctacttccaggggatgtgcgtgcgtgttctcgtgccaagccggggcgaaggtaccgagcatgggtggacagactttttatcacacagactggttcagatagttgggtggggaggtttgacttgtgggaatcagaaggtgatgtgcgtgtgtgttctctgtcaagtcttgctttgattctgaaggctgaatccccagagggctttgtgctaacccacatccaaaagacatggctgaacggatactcgtcaggggttgagcaggcgtttaagctgtagagcagtataccgtctcggctcgtggttggagttttcttgagaatagaatagaataatgtacctgtttataatattaacttcccaaaacagcactggaggatcaccagggagaggattcggtgccttctcctatttggcgcgtaagataaatgttttgtctcatggctttcatgagaagatgaaattgactcatcttggtatatatttacaaatcttgaataatgcagcgttatctaaaaaaaaaaatgtcaacggcaatccagggaaattgggtttttacttcattactcattaatgctttatttggttagaagatgattgatggagaaattagtttatttccctttcatttcactccaatcctttctaaccaaataaaccacaggtatgttaatggagaacccttaaatttatgggggatctatatgcctaatatgcaaatataatttaaagccatccccaatctaatgtattttgtccaactagcaaaccttgtgccatataagtgcatatatagtacttcctgttacgtttgttgtgtgtgttctactatttgttcatatagtcttagtcaatgcatgtgttacatttaacacataacctgtgggtatccaatacctacatataggcataagtatagacatgaaatcacgcctatacatggttaggtgatacctattgagtatatgaacgtgttctcattcctaggtgtatgtcatattctcatgactaccgctatgataggcagcccgtagaattataaagatgttgcaataataaattttattcaatgtagtttatttctctatacttcgtttgggtttattcgtttctcaatatatggcacctatcgtttgtgtgtgctcgttaacatcacctgcaatcataattcataaaccttgtgtcatataagtgcatatatagtacttcatgttacatttgttgtgcgtnttctattatttgttcatatagtcttagt

SEQ ID NO: 5292 - DNA, 925 bp, Zea mays
  misc_feature (919)..(919): n is a, c, g, or t
gggcgattgggttcctcgaggccggccgggttggcaaaggtcggggcagagaggagaggaagcagcgagaggagccgaggaagaatatatccatcctaacatccacccacccacacaccagacacacataccttattctccgccgtttcttggcctccggaaatctcctcccccaagttgcaagcatgggcgggttcagcctcagcggcgctacaggtctcgcggcgtaccgcgaggaagacgacgaggagctgttcgagacgtcgtcttcgatctccggcgactccgacgatgagggccaccagctctccgatggagaggggggcgcctatgatttgtcatctgtgatggcacagctccctgtcaagaaagggctatccagatactacgacggcaagtcccagtccttcgcgtgcatgtctgaagtgcgatgcctggaagatctgcgcaagaaagagacgccctacaagaagatcaagacatcaaggagtagcgtcgcgttagacgaagagcaggactgtcatacgccgggtcgtacgaacagcagcagagcgcccggaagttgttgcgcaaacctggtggctcggaacaacggcaaaaacatgctgtacagacctcccccagtccctgtaaacaaaagtggataccgtcagtaggctctaggacattactggatgatatctatccagggtttcacctcttgttttttttccatttttgagggattttgttgacaggcgtattggcctgtctcagatgtaatgtaagagggtttccttctctgctcttagcagagttatctcctatgatcttgtccatgagacattggttcgtgtaaataatagtgatgttgtaaccaaaaaaaaaaaaaaaaaaaaaaaaaataagggggggccccggccccgtgcccccctggggnaaaaaa

SEQ ID NO: 5293 - DNA, 4236 bp, Zea mays
  misc_feature (54)..(54): n is a, c, g, or t
  misc_feature (340)..(340): n is a, c, g, or t
  misc_feature (494)..(494): n is a, c, g, or t
ccttcatttatctactttgcgctcccagcgatttatccatggtcatgttcatgnccagggctaacatccgttcaattttcccacttttttcctcctgtttttttcttgccttttcattttcccttttttgtatatgctgagaaattcgaccaaaataaaatacataaaaatatattggataaattttatgtacattccaaaaaaatacgttagacaattataactttcgtgtacatgctatgtcatttgtataattttattgtgtaaagaataaaatttggaaaatgaagacaagataacctaaaaaagaaaataagaaatagaggataagaagaaaaangaaaaacatgggtgtttgaaaataaaattaagaaaaccatcaattagagtaaaataaataaataaataataaaatttaaaatataagtaaactgaaaaataaagcaaaggatcaaataatataaaaaatataagaaacagagccatgctaagangagagaaggaagctatgacctgcgttgatgtctcgatgaaagaccacagcaactgcacgtgatttcgtgttggttacgtagtgggccacgcttgcacatttgaagtgggccacgctcgcgcttatttgggctgccttccgcgctgctggtcggcggacggcagggtgccgactggtcgcacaatccgacagtcgccgccgatgattcgcgtgcgatcaactgcacattgcatccccgcgaaatctctggccgatgggtccggatcttggttacaggcaggtggtccccagttatcgcgttggatccccctggccaatccgggtcccgctccggatcccatgctcccggtgcgcagagtgccacacacgctacacgaaccataacctctgctcaccccttgacgcgtgtcccggaatacctggtccctcatccatgggcctcctctccaccaccacagccccacttatacaccgcgccgggtccacatgccatcttttatttttcgttattgtagcactggtccaacctgtcagaaaagattggagtagctgggaggtcacgagtcacgcacggatgcgaatcttaaggccatgcgcatgctaatgcttgccctaatccgaatggccgctctcataatacacattaattaatcatgaatgcgctgcaaatttgaccatcatgcgtggggccacgcgcggtcccacgcgttaccaagctgggcaaacgacaacgcgccctgggccgtcggatgcgcgcccggcgcgtagattaatgcggcgggccccgttacagatcagccgggtcccccggcgcgacacgggtgggcggtggccccgcgcgttatggtcccaccgccaagtgacacaccgcctgataaatctagctctctcgtccggggcggcgagccatgtaaaaccgtccgacgcgagccccacctccgcgctcgcacgcggaaggagagggacgagcgagccaccgtcaccgagcgcggttacaagaaaatccaatctctcccccacgctcgtttcgactcgcgccatggaggcgcaggcgcaggacaatagggcggaggatggggacggcgcgcggcaacacgtagccggcggcgtcgcggcgacggggatggctatgggcgcgatccccatgcacgggttcatggtcccgaagccagagccggtggagttcttcggcgggatggccgtggtgcggagcaagccgccgccgcggaaccgcgaccggcacaccaaggtggagggccgggggcggcggatccgcatgcccgcggcgtgcgcggccaggatcttccagctgacgcgggagctagggcacaagtccgacggcgagaccatccggtggctgctgcagcagtcggagcccgccatcatcgccgccaccggcaccggcacggtcccggcgatcgcgaccacggtcgacggcgtgctccgcatccccacgcagtcctcgtcgtcctccagcccctcgtccctcaccaccgtggtcgacggcgacgaggcgtccgccaagcgccgccgcaagctgcagccgacgcgagcggccgccggcgcgtccccgctcgccaccgccgcgcccgcggcgtactacccggtcctcgccgacccgctcctgcagggcaccggtggagcggccatctcggtgccgagcggcctcgcccccatcgccgcgtcgggcgcccctcaagggctcgtcccggtcttcgcggtccctgcggccggcagccccggcggcggcaaccgcatgattccgcaggccaccgccgtgtggatggtgccccagcctggcgccgcggccgcccagcccacgcaattctgggccatccagcccgcgccgcagctcatcaacctcggcggcgcgcaggccgccgtgttccccgcggcggtgaacgtcgccgacttccagggccagcagcccatctctagcttgtctcacaacagcaactcggagcatctgcacctggggtccgggtcccacgagcagcagcgcggcggtcgcagcgacgtcaaccatccggaggaggaagaagacgacgacgacgacgacgagccggtgtccgactccagcccagaagagtaacgcaccaccgtacgcccagaaagtccaaccccaaagcttaggttccttttgctctaatttaatcgctccccctcgttttcccccctttcgcaatcctccttatgatgaactacatgatgctttctgtcgtagctcacgttcagttcagtgacccccagtgttagtggtagagagaagaagatgatgatgaaagaggtagtggaactgtagaagcagcgtgtaatgcaaatcaaaacgagcagctgatttgttattgagttaattaattgacgaccttttgctaatataattctttttttttactgtgtcgccatttttgtttggtgagcttgagccctcctgatgaggagagtgaggagggatgggtttagcgtactctgctaatcctgctagtgtgctagggatggaggcgaggcggagcggcgagcacgtgcgtacgtggtggcaaaatttaacgcacacggccggaggtgggtccggcggagtgggttgcttttcttaggctccggcggtggggcccggagccggtggttcgtggcgcgggccccggacgcaaagcgatgtggtggtgggtcaaagcgcgcgccctcgcggaccgtgcgcgagcgcaccagcggctggggtggggtggggtgtggcgtgtggggacagccaggcagccacgagctgcccgtcacgtgactggtgggcggaggggggcccctcctcgttgccgccgcgtggtggggctccggcaggcgcggcggtaggtgtggggtcctggacccgctcgcgtcgcggctggtgggcaccggcccggacacgtgttgggtggctggtggtggggcctcgttggcccccgcgtgccgtgccgtgcccctccgctcttcccgccgtagggacccggtcctggtggggccgaggatgctggtgacgtggggccctgcgaatattccacgctggatcccaaatccagttacaggattaacataacaatgaggagggtagggttaacttcaaattaatcagtatcgttaccgtttcgacgaaagaaagaaaaaaagggcgtcggcgtcacggtatcagccgacaagctcgtggtcgtggcggctcccgggaagaaaagagcgtgatgcgcataaaagccggattactgtaaccgcatctgttgtcttgccgcagctgacagaacgagaggggcaagtaccgctgctgctagtcgtgtagcaagcagtgcggagataaaccggagagaaagcttttcccgccggcgagtggcgcacgcccgcgctggcgctgcgctttccgttaaaagcctactcgctgttcagccatgaggtcgccactagcgaggcgaacagagcaggagagcggggcgggggcaggggcccgcctgcctgttggattagcattttgctcgtgcacggaacacggtgcgccatccggcccggatgcttcctcactcgtccggtcggtcggccccgcccgcgatgtcttttcttccccatcgggcccatgcccatccacccatcgaccgcctaaacaaatcattccgggtttcgcccgcgcccgtcgggcgtccgctcttccgttggcggcaggccggcagcgcgagctggcaacgcggcgagccggcgagcggtggctgctggttggtcacgacgatctcgtg

SEQ ID NO: 5294 - DNA, 770 bp, Zea mays
gggtacctcgaggccggccgggccgggaacccctagcgtccactccctcaggtacctggggctcgcccggccggccgggaactcccgccgccgccccttcctctccgtcgctcgcctcgcgcctacgccaccacctctgccatggccccgaagaaggataaggccccgccgccgtcgtccaagccggccaagtccggaggcgggaagcagaagaagaagaagtggagcaagggtaagcaaaaggagaaggtcaacaacgctgtgctcttcgaccaggccacctatgacaagttgctctccgaggtgcccaagtacaagcagatcaccccatccgtcctctccgagcgtctcaggattaatggatcattggcacggagggcaatcaaggatctgatggcaaggggactcataaggatgatctctgttcattccagccagcagatatacaccagggcaaccaacacatgagggctgttttgcatcttgtcggcgggtctctagacggcttaatgttgctattatatcatgtttatttcaatcatggctcagtcagccttactgttgtgtcggatgttggaatatttttagattactgtactgtttaagctcatgttgctatccaaatattcatcttgaggaataccaatctgtctctgctctaatattacaacaattgttaaagttgcgcgtgttgtcatgaattcagtcctattgacatgcgctcaacgaaaaccagaggatgtttcctagggctaaaaaaacccgcggcc

SEQ ID NO: 5295 - DNA, 2270 bp, Zea mays
tgtctaaaatcgatgggaaatttactctaccaccaccacgatcatacgaaacgcggtgcggcgggcacgccgtttttcggttccgcccctgggtacagcgcgatttagcgtgcaccacccgatcccagccaacaagatcccctggaacaagatcccctctcttcctcgcattcgcatcgcctcgattccacccacccacctccgtccgcctccgagcaccaccaaaccctagatctcgcaccggcggcagccatgtccaagccatggggcagcgtcggcgccggcgcgtgggcgctggacgccgagcgcgccgaggaggaagagcgcgagcaggccctgacctttccggcgctcgagccgcccttgcccgcgggcggcgccgccagcttcccgagcctccgggaggccgccgccgcgggcggcgggggcaagtcgaagaagaagaacaagggcaccacgctgtcgctgtccgagttcaccacctacggcgcggccgcggcccagcggcgcgcggcgcctgtcgagcccaagggcctgacccacgatgagatgctgctgttgcccacggggccccgggagcgctcggccgaggagctggaccgctcccgcgggttccgctcctacggcggcggcagcggcttcggcggccccgggggagagcgccgcagcggcttcgacgacgaggaccgccgcgggccgggcagaagctcggatcttgatatgccctcccgcgccgacgaggctgacgactggggcgccaccaagaagtttaccccggctcccacagactctggccgccgcgataggttcggcggcccttcccctctcggccgtgctgatgatattgacgactggtcgcgcggcaagaagccgctcccggcgcgctaccccagtctcgggtctggaggtggcttccgcgactctccagccttccgcgactcaccagctgcttctgattctgaccgttgggtccgtggcgccacccctttgccacacaacggcgagggggcgggggagaggccgcgcatcgtcctgaatcctcctaaacgtgatccgttagttgcctctaccccacctgctgaggtggcccgcaaccgaccaagcccgttcggggctgcaaggccccgggaggatgtgctggcggagaagggggtggactggaggaagtttgagaatgagattgagcacaagaccagccgtcctaccagttcgcactccagcaggccaaatagcgctcattcctcccgccctggtagccctgggtcgcaggtttcggcagttgggagtgaaggagcaccgagggcacggccaaaggttaacccatttggtgatgccaagccaagagaagtggtgctgcaggagaaagggaaggattggaggaagattgatattgagcttgaacatcgtgctataaataggccagagtctgatgaagaaagaaatttgaaagaagaaatcaaccttctgaaggtggatcttaaggaaatcgagagaaacatgagtaatggttctgaccagacatcggtagatgcaaaaggtttgtctgagaagatatctcagttggaaagccagcttgagcagctttcaagggagttggatgacaagattcgatttggacaaagaccacgttcgggtgcgggcagggttacagcacttgcaccaactagtttaggggaggaaccacatgctacagtggtggacagaccgcgttctcgtggtggtatggagccaccaccaaggcaggaagaaagatggggatttcaaggaagcagagaaaggggctcttttggtgcaagcagaaattcggacaggccaatggcaaggcagagatggtgaaactgggacaacaagcatctcttagggatatttccggttcccagtcccttttttttgttctgaaaagatgggcaaaataagtcgttacttatttgtttgtcgtgtttgcttggtctagaagattgttgaggatggagataactccacatgaagttattggtttgtcaactctatgccgtaggatgttttgcgtttccctttttgccatctaccatgtcaaaacgatatcttagcaacctccgatactaactgttatgcttactggattccagttcagcatatgtcactagttgattatttgtgcactgcttagtggaaaccttggatttgcacttttactgatgctatgtcacctttctgttagtgttttttttaaaaaaaaaaaaaaaaaaaaaaaaaaaaaaaaagggaagccgctcgcgatctagaactag

SEQ ID NO: 5296 - DNA, 2518 bp, Zea mays
gcggtccgggcgcggcggctgctgctgctgtccctggcctgctgcagcagcatttggccaggcggacggatcttcgctgctgcggacactgaccccaacgatcttaacgtcctcaacacgctcttcaccagtctgaattctcctgggcagctcacaggttggcaggcgaatgggggtgatccttgtggccagtcatggaagggcattacttgctcaggatcaggggtcactaaaatccaattaccaaacttgtcactcactggaaatttggcctacaacatgaataacttgggttcattagttgagcttgacatgagccaaaataaccttggcggtggaggtcaaatacagtacaatcttcccaatatgaagcttgagaaactcaatcttgcaggaaatcaatttggtggaaatttaccctactcaatttcgacgatgcctaatcttaagtatttaaaccttaatcataaccaactacaaggaaacatcagtgatgtattttccaacctttacagtttgtcagaactggatctgtcctttaattcccttactggtgatctaccacaaagtttcactggattgtcaagcctgaaaaaagtgtatttgcagaacaaccaatttactggtaatatcaatgtcttagccaatctcccccttgaaactttgaatgttgcgaacaaccatttcactggttggattcctagtcagcttaagaagataaacagtctacagactgatggaaattcttggagcacaggaccagcgccacctccacctccatacacagcgccgcctcctcctccaaaccattggaatgctgatggttcatcaagttcatcaagttctggtggaagatctgggataggtggtggaggtgtagcaggaatcattatatcgttgctggttgttggatcagttgttgcatttcttgtgatcaaaagaagaaaacgcaaagctgctatgaaagaacattttgaacagcaccagccattcacttccttcccttcaaatgaagttaaagacatgaagcctgtctacgaggccaccacagtagacatagagtctttggcttcacctgcttcagttaatctgaaaccacctccgaagatagaacgaaacaaatcatttgatgatgacgatgatttttcaaacaagcttgttgcaaagaaaagtaatataacacctataaatgcaactgtttattcagttgcagatctacagatggcaacagatagctttagcttcgacaaccttgttggagagggtacttttggacgtgtttacagggcacaattcaatgatggaaaggttctggcgatcaagaaattagatagtactgtgatgccatttcaatcatctgatgactttgctgaactggtctcgaacatttcaaaattgcaccatccgaatctgaatgagcttgtgggctattgcatggaacatggccagcacttgcttgtgtatgatttccacaggaatggatcacttcatgatctactccacctttcagatgagtacagcaagccacttagctggaacactcgtatcaagatcgcactcggctctgcccgtgcactggagtaccttcatgaaatatgttctccatccatcatccataagaatttcaagtcgtcaaacattttgctggactcagaattcaatccacacctttcagatgctggacttgcaagctttattcctgatgctgaattccaggcagcagaacaaagtgccggatacactgccccagaagtggacatgaccggtcagtacaccctcaagagtgatgtctacagctttggagttgtcatgcttgaactattgacaggacgtagaccatttgacagctctagacccaggtcagagcagtcacttgtgcggtgggcaacaccccagctgcatgacatcgacgcattggacaggatggtcgatcctgcactcaagggtctatacccagccaaatctctatcccgatttgctgatgtccttgccctgtgtgtccagcctgaaccagaattcaggccaccaatgtcagaggtggtgcaagcattggttcgacttgtgcagagggccaacatgacgaagaggatgcttgatggggatacttctcggcgaccagatgacctggaccaagatttcatatgacaagctgaactcttgtcagattgtatttatttcgttcgactagcggcccagcagagacataatcacacaagaggaagaaacagaactctgtcagcttcgccagtacataatcacaagtttttcttggtagcaaagttgtgctatatggttgtactgtgtctacaaaatagtaccttgatcttacgctaatggcatattgttataattctttggtaacttatatgcaaatgccccagataaacaaaactatggtgaagtgtgccgaatgttaaaataactgattagtccagtactgctgcatcaactgaaacaagttgcacagtggaaatatttatcttggtccctcaactaaaaaaaaaaaaaaaaaacaccc

SEQ ID NO: 5297 - DNA, 4376 bp, Zea mays
tttaaaacaacagattttacaaaaaaatattacatttgagagtacgataaatatgtacgtacaaaaatgaaaagtaaaatatgtctctaatatagatatttatgtacagagaacgagatatagagaatattgttagagaaggaggagatatagaggagagaattttttaaataatattataaagaatgaatatagatgatgaatttagagtgagtgacatgttgctgtcgatacatttatgcttctggcaagccgtttcaaagcttttggtcgagcacagccgagcacctgttctcacgcttaccagaaggaccaacgagcgatcgtgttcctcgttcaattccagtcccgtcgctctccagtctccacatcaaattcatgacgattgtccgattcttttaggacgccaagctagctgttcggtgacctgagcggctgagatggattcccagcgattcaatccagggaggcttgccgagcgtcgtttcgatgcaatcgagtgcatccgttgctggatcaggacatctaatccatcataattatagcagtactatcctatggctgccgtaaacgaccctgcttctatttagagtttttttaaaaaaaatatatataatgtagtagattagagacacgatgccctcgttgagtgggtccaactgtcgtgcgactgtttgtatttgctcacacgcctgactctttcagttagggtttggtacgtcgctcgtatccatccacgccagctccaaggcagtaggcagcagccgttctcgtggctccagaccgcgcgatagctggctcgcttggtcagtggaggaagtcaggaaaggaacaagagccagcgtgcgcgcgcacaccaaacgacagcaagagactttgctgttccagattggaggcggagctcggcgcggcggcgctgcagtctgcacgactctttctccagctgcccattttatggtcgctcgtcaaaaggacggcaagtcggcatacgaatacccgttgaatgaaaccaggtctggctgttgcatgttccttgttcggttgttcgcccttgcgcgggagccattaacaattttaccattgtcatttgtagactttatcagtatgtcatccgatttataaacaaatcaaaattgagagcgacaaaatagcaagtttctcgcgggcacgttgctgcaggctgctacagtgcttcctgcctgccacgagcgatgcagtatagtaggtgcaaacaaaacaatttgctagtgtaataaatgacagttggacagcagtgcccaatcccgttacggcctaatttgggtaatttagtaataaaagaaattagagtgaattgtaatgtattataagagtttttgatttattaggaatttatacattctccaatctctctaaaccacttcaatactagatatccaaactgagcacaccggctggagagaaatgtacgaagaaacaccggagtagaactcgatgggagcccaacccaacaactccgctgcagcccaagagcagagaatgccagcccaatcacggttttccttccctctgaccgaccgacgcccggccggcggcggggccccgcccccacgcctctccgcatgacgaaagagccgacgtcactcctcccgatctgggcgcggacgccaacgacgcgacggcccaagtcgcgacgccaccagctccccatcccctcggacgccatggaggaagctcgcgaccacaggctctcctccaccgccggccgccccttcctctctggcttctgcgccgcggcgctccgacgtaagcccctcggcgcccgcgcctccgccgccgccgccgccaccggcgagggccttgtgcggcagctcggcgtcctcgacctcgtgctgctcgggatcggtgcgtccatcggcgccggcatattcgtcgtcactggcaccgtcgcccgcgacgccggcccaggtgtcacgatcagttttgttcttgctggagctgcgtgcgtgctcaatgccctgtgctatgctgaactggcgtctcggttccctgctgtggttgggggagcatacttgtacacgtacgcagcgttcaatgagatcaccgccttcttggtcttcactcagttgatggtggattaccatatcggcgcagcaagcattgctcgcagcttagcaagctactttatcgagttcttggagctaatcccgctcttgaagggccaaattccaagctgggtaggccatggggaggagttttttggtggtgttgtatcaattaacatactggcccccgttcttctcatcatcttaactgcgattctctgctatggtgtcaaagaatcatcagcagtgaacacgtttatgacaacattgaagataatcattgttatagtcattgtatttgctggtgtgtttgaggtggatgtatcaaactggtctccgtttatgccaaatggtttcaaatctgtagtgactggagccacagtagtcttttttgcatatgttggatttgatgcggttgctaattctgctgaggaagccaaaaggccacagagagacctacccattggtatactaggaagccttatagcatgtgtgttgttatacgttgctgtatgcttggtcattactggaatggttccatatacattactcggtgaagatgctcctttggctgaggcttttgctgctaagggcctgaaatttattactgtattgattagtattggagctgttgctggacttacaacaacacttcttgttggcttgtatgttcagtcacgtttgtactttggacttggaagggatgggcttttaccttcagtatttgctgaagtacacccaacaaggcatactcctgtacagtctcagatttgggtcggttgtgttgcagcagtcatggcaggcctctttaatgtgcgtatgctctcacatattctttccgttggcactctgaccggttattcagttgtatcagcttgtgtgatcacactaagatggaatgacaaaggaactagtcgtcgctcccttggaagtatgtcaatttggcaagagggtgttctaagtcttgtcatagttgctctttgtggttttatagtgggactttgctatcgctttaactatgctatagcctttatggttgtagcttttctgatagctgttgctgccagtttcgctctccagtttcgtcaggtctatgtggatccacctggcttttcttgtcctggggtaccgttggttcccattatttctgttttcttcaacatggtcctgtttgctcagctacatgaagaagcgtggtatagatttgtcattcttagtctcatcgctgtgggagtttatgccggctatggtcagtacaatgctgttccttccagctcagaacactctactattggttaccatggcattccttctgaagccgcatgagctatgttcatccccggagttcttcgaacatactgtatggtaccaacatacaccatcgtcaccgaagtttgaacctgttgcttttttttttgatgttttgcacagtgcatactcttgtagttacgcttagtactcctatacctatatctagacagtgaatttcacagcctgtgttgtgcccaccacaccattcgtcaggaagcttgccaagtgcatagaccttgtaaaaatgcaaatgaaaataaagaactgcagctgcattgtttgtaggaactcattgtcatgcactatgtataattctgtgtatattgtgaagagttcatatcaaattgcactgcggccgtcttttgccgttgccctacattcctcgcgtcaaaatcctgggtccccagctcccttgttgctattgggcctcgctccttctccgcgccactccgccaccgcacagcctgccctcgggagcgtttcagcgtggacatttcactcgattttggtgttactgtcaccacactgcccgccagaccgccatgggttggacttccacgcccgtccagtgcggcccttgcattcaatggctagacgcacggcagcgatggtcatgaactcatgattgcagcagagatatacatattgcttgcatgatgtgctgtgttgattgcttccgtctaaaatacatcattcacattgtattagtaactagtaagcatagatcttaccataagtattttattttccctttcaacaacgttattcaattggttagtgtatttgttcaaaaactcatgcttggtgtccatggcaccacatagctcgtctattcttgaatttataaactcactttcattatcactcttcattttcttggtttttaattcaaactcggtttcaattttcttacaaatgatttaaggatgttgaagatttctctcttgtcctttgagagagaaaacctatgtgaaccttaag

SEQ ID NO: 5298 - DNA, 2162 bp, Zea mays
gattcacaggtgcctccagtcacttttaaccctcgggggccgctggtttttggctttttttgtcaacaaagatatttcttttttctttatttcttacaatctatgggcaaatgatttgccaatgtaaggctattctctggagctaaaaaaactttgatcaagatacacagggaagatcaaaatttttgaggttgcaccaaattattaatctaaaatactgcactgcatgtcccacgttccagaaatcaattgcaggccctccaaatggaattaaaatgaagagattagacataggcatgtaagaagctacatgagaagttctatcggaccttcagcttagcctaaaatgcccgtgggcagaagttacccatcaaggagtaaacagactcagcagaatttgccttctttatccttccttttggtcaagatgtacagttgataatgtaatagccctggtatgtcaacaactcatcacagcacaattgtacacaaagcttccggaacggcgggtgccaatgatcttccaatctggcagtccattattgggtacccaggaacaaatttcaatcaccccgctaccaccagcactcattgcaccaattacaatgagcatatctccacaactacggaaagcaatgccccagccatgaactgatgtatacctcccgggtaacaatccaagagtgatccatgcattattttccttgtcatatttcctaacctccttcgttgcatagtcagcagcataaagttcattattcacaacagcaacaagaggtggagcaccacttccaccattaagaccctgtgccatatctgggatcaagcgccaggtgctgctctccaagtcaaactcctcagcacaactaaggatctcattgtgcctctcagatttcccaccgatgacatagaacttgccatccatgaagaaaccagagcacatctgccgtgccctattcatgcttggaagagtggtccatgtctgcatctcagaatcataaagctcagcagagtccaatgtaccgttctggccaataccgccagctacaatagccttctcaccgaagcttgcggagccaaataagcaccttggtgtgttcatcatttctcctgtagtccaagagttagtgagaaggctatacctcagcacaacatgggcttccaccctcttcccaaagacgaggatgttggtgcccacggccagggattctttatcagcaagtgtgaagcattctatgggaggcatggaagggatgctgaaccaccgttggcggcgcggatcaaaaccttcccactcgagaacattgcatgagcagtagatcatctgctcgacgatcccagcctcacgcctcaacctgtaaagctccccaaacctcacaagggagtagaaagatcgattaacacatgccacatcataatagtaagaccggggaagacggagcaggcatgaaatggccaactccctgccgatcccgccgatgaggtcgcccgtgttgacttctccaccctcatcagaaccctccatctcggaggaccaggctctggctgcaagattcctcgaaccactgccggtcttgttcttcttcttgctataacaattcaccagaccctccacctgtcctcccttctgcgcccaccccacctgcaggcggtcgatcacgcagctcctgctcacagaaggatcctcttcagcgcgggtcaaatcaggggcagtgcttgatgaggttgccgagtctaagcccagtatcatgcgctggtcccccaacatgacctgagcacccttcggatttcacagcgaatctaccgtgatcctaaaggctgcaccaatcctccggcagccaaatccacagaaaccagcaggaaaaccagtcgcaggggcgggcgcagttaagggcctgggctgggtgtacacatgtacgcctggtgcggctcgtcgccggcgaaggggccgaagaagacctgccgaagggcccgacggggactgggcggcggcggctgccaggggtgcgggcgcccagtcgtcaccacagaggagagagagagagagagagagctcacgcggcgaggggaacgggagaagagaagaggcagggccgcagcccgcagggacaaacgcagaccggggtccgggtgtgtcgcccggcccctcgagggacccaatg

SEQ ID NO: 5299 - DNA, 1234 bp, Zea mays
aaaacacgactagagtgggtgggagactgggaaagacgagacagcgagacaccactgagacgagagtcagccggcaggtgagacatcgcaggggaaccagctctcaagacggccgacggccggcttgcctacctgctcccatccttcccgagggaccgagaaagataagaaaggcggtggtcaacttgtgtcctgaggtgcccgtagaagcccaaggacaagaaacaaggagaagagtagatctacatctactccaccgatgagcgcgtctcggttcatcaagtgcgtcaccgtgggggacggtgccgtcggaaagacctgcatgctcatctcctacacatccaacactttccccactgactatgttccaactgtgttcgacaacttcagtgccaatgttgtggttgacgggagcactgtcaacttgggtctgtgggatacagcaggacaagaagattacaatagactgcgtccgttgagctatcgtggtgctgatgtttttctgctcgccttttctcttatcagcaaagcaagctatgagaatgtctctaagaagtgggttcctgaattaaggcactatgctcctggcgtgcccataatccttgttgggacaaaacttgatctgcgtgatgataagcagttttttgttgatcaccctggtgctgttccaatttccactgcccagggcgaagagctgaggaagctaattggtgctgccgcctacatcgaatgcagttcaaaaacccagcagaacataaaagcagtgtttgacgcagcaattaaggtggttctccagccaccaaagcaaaagaagaggaagaagaaggtgcagaagggatgcaccattttgtaactacaaacggtagagggcaacagtctggctgcggcgctgctgccaatgataaccatcgcctccttgctgtataatatatcgcctgatcatgccaccagcatgcacaagggagatggtggttttaggatccttgtcctactgtgttgtgtagaccaccgggtgtagttgactgtatctggttgtttgtatgtatggacaagacaaaactagcactgcagatggtatggtaaggcgtaagcaaatacaatatgacactggtccagttccaggaatgaatggaatatgacattggtccgagatttgcaataaaaaaaaaaaaaatcaaccaaaaaaaaaaaaaaaaaaaaaaaaaaaaaaaaaaaaaaaaaaaaaaaaaaaaaa

SEQ ID NO: 5300 - DNA, 2704 bp, Zea mays
  misc_feature (1698)..(1698): n is a, c, g, or t
aatatagaaatggaaaagataaggcgaacgatgtccacctagaaaccctagttcgaacgcgccgccgtcaccgtcgtcgctcgcgctctccgcccggatcggagcgagagtaggggcgtgtcggcggtgaaagcgactgcgtcagccatggcggacgaggagcattcggagaggagagaggaggcctccgagcttgcccccttcgacccgaccaagaagaagaaaaagaagaaggttgtcatccaagaaccttctgatgaagtggacaagcttgcagagaagacagaaacactggcagtcgcagaacccgctgaacttaacttcactggaatgaagaagaaaaagaagaagccggtggatcttgattcaactcttgatgagcttggagatggggaggacactcaagatgatcaagctgtagaggaacaaggggaaggcattgtgctgggaagtgtccctacatacccttgggagggaactgatcgggattataaatatgaagagctgctggacagggtgttcaacattctacgtgagaacaacccagatcttgctggggataggcgtaggaccgttatgaggccaccacaagttcttagggagggaacaaagaagacagtttttgttaactttatggatttgtgtaaaacgatgcataggcaacctgagcatgtgatgatgtttttacttgctgaaatgggaacaagcgggtcacttgatgggcagcaaaggttggtgatcaaaggaagatttgcccccaaaaactttgaagcaatcctgaggagatacatcaatgagtacgtcatctgcaatggatgcaagagccctgataccattctgtccaaggaaaatcgtctgttcttccttcgctgcgaacagtgtggatcttcaaggtccgttgctccaatcaaagctggattcgttgctcaagtcggtcgtcggaaggcatgagcatctatatgtggatggtgttggggtcaataccaactcaacaatagttgattatttgttgactagagattctgcggcgcaatgttgagcaagatatatcaacgatgccctttgtctgcattcaaaggattcatctattgatgtcacaagcctatgaaaactggcgagtgtgaatcctgatctacgactccctgcgatcataatcctgtgactgctggttagtgtcaaatgcagtctgttaaacttcttgatgcggtcactaatacaagttcatcaaagttttgtccgaatgccataattctgtcataaaatttactttctctgtaatacacaatgaatctaagtgtttacttcattattcgatccttggaattcagctgattcattcaaacaaacattctctttagcttcaaaagcatccaccaattaaagctgccatccgtatcatttaacaagtaaattgtgtgaaactgcaaattaataaactcattcaaaattttcatttgacgcgtgcataactgaggaaacctcctcttaatctgctaatcagtcgccgataaaatattatagaagattcggattatatgtgtttttctttctcttagttagtctttggttgcacggtcttacgtagtgaaccgggctgcatgtttggtttaattcagatggaaccgagccatttcaacagtgaaatattttttttttaatatgctgcatctttggttccctaaaaacgaccaaacatgngtgctcccgagtccaacactcttatcgtttttgttagtagccttctcttttgtttcaactaggctccaaacactatcttaataacacactagtacacactagtataatgcttatatgttgcgaccatacacaatcatattggatacctgccaacagtgtcacggacgagagcctagtaagccgctgtagcgcctgatatgagcctcgtggagaagcaatctgtagcgtctggtatgagcctcgtggagaagcaatgactagtccgcctggtatgagcctcgtggagaagcaatggctagtccacggtgctcgtactttagcgcttggtactaagacctcgactcgaggcattttctgtaccccttcttaccctgaaacttatcccttataacttgaatttcgtgagtcggaccttggaaagtttttgaataaacaaggggaatttgtagatcctccaaacgtagagcgtgaaaggctttgaaaccaaatacgttatccactatggaagtaaacatgttacagtgaattcaagatttataatgtttcagactcaacgtttatactttcagtctttggtggcatacgctatcggcacataattgtttgtaataggggttataagcgggcgagagatagaagggtcccaagtctctaaggattgttctgctagagggcctacatatcgaatgttggctctcgagttcgtctctcttctttcaatccgaccccctcccccgcattttatagcctaaggatggggtggttataaatgactttttctcagaaggatttgttgtgctgtaaaacaaaatagtttcccctggataaaccccttatgtgtcgttattagtcttgtataactctccatcgtgcctcctcaggactgctagtgaagcgtgccgatgacttgagtctgagcgtcatcattatttcgcctgtgtgcctctacccacgtcgacccttggtctaagggcatgtacagtggagagacaccaaaaacggttct

SEQ ID NO: 5301 - DNA, 2345 bp, Zea mays
attgggtacctcgaggccggccggggtgaaggagtgcccctctcgacaggctaagcttttactcaaaaacgcgctgtccccgccggcccccctgtcaaccttttttctttgagaaaactcggccccccgcaggatcttttgttccggaccccgtgagtcgctgccacgatcgaggcagggcgccaattgcggtggccaccacttccaatccactccccgcgttcgcctcgccgagctgttcttgctctgtcctctctccaactccacgatttgttccacacccggttcccgagcctccgcagcgcttcttgctgaaaaagggaactccgagttctccagctctggatcggcagagagcggtggttccttttgcggactctgaggtccagttcttgtttttgatttgtctcatcaacccaccagtcgggctgcaggcttagagctggaaggaataatttgactagagaaatggggcagtgttgcagcagagctacggccccggactctggacggggaggtgccaatggttatggctattctaaccaggcaaagccggcgcaagcacctccgagttacaaccctcctcagcaggcggccgaggtgaggtacacaccatcggcgacgaactcttcggcagtcccacccgtggctgtgccgccgaagccaacggcggacacgattcttggcaagcagtacgaggacgtgcgctctgtctactccctcgggaaggagcttggccggggccagttcggggtgacatacctctgcacagagattgcctctggtaggcagtacgcctgcaagtccatctccaagcgcaagctcgtcagcaaggcagacagggaggacattcgaagggagatccagatcatgcagcacctgtctgggcagccaaacattgtcgagttccggggagcatacgaggacaagagcaatgtccatgtggtgatggagctctgcgcaggtggggagctcttcgatcgcatcattgcaaaggggcactacacagaacgtgcggctgctacaatctgcagagcagttgtgaatgttgtcaacatttgccacttcatgggtgtgatgcatcgtgatctgaaacccgagaacttcttgcttgcgaccaaggaggagaatgcaatgctcaaggccactgattttgggctttctgtcttcattgaagaaggaaagatgtacagggacattgttggaagtgcttactatgttgctcctgaagtccttagacggagctatggaaaagagatagatgtttggagtgcgggtgttattttgtacattcttctcagtggcgtgcctccattttgggctgaaactgaaaaggggatatttgatgctattctgcatgaggagattgactttgaaagtcaaccttggccatcaatttctgagagtgctaaagacttggtgagaaagatgttgacacgagatccaaagaaaagactgacttcagcccaagttcttcaacatcagtggctcagagaaggtggggaggcatctgataagcctatcgacagtgctgttctttctagaatgaagcaattcagagcaatgaataagctgaaaaagatggccctaaaggttattgcttcaaaccttaacgaggaagagatcaaggggctaaagcaaatgttcatgaacatggacacagacaatagtggcacaatcacatacgaagaactcaaagcaggattagccaaacttggatcaaagctgtcagaagctgaagtaaagcagttgatggaggctgctgatgttgatgggaatggatctattgactatgtggagttcatcactgccacaatgcatagacacaagctcgaaagggacgagcatttgttcaaggcattccagtactttgacaaagataacagcggcttcatcacaagggatgaactggaatctgctttgattgagcatgagatgggcgacacgagtacaataaaggagatcatatcagaagttgacacagataatgatgggaggattaactatgaggagttttgtgcaatgatgagaggagggatgcagcagccaatgaggctcaagtagcctgttcccttaatagaaacggtgtaccactagttactgttcactttttttcttcatgtttggtacttggtagtcggataaagcttacaatgggtgttgcttttgtattgttgagagatgattgtctatacctttttttccctttttgctcgtgcttgttgcattgtagtatcttgaacgtcccttcctttttttaagtttgtttatgcaagtacatctaatacaaagtgcattttgtctttaaaaaaaaaaaaaaaaaagcggccaaaaaaaaaaactcg

SEQ ID NO: 5302 - DNA, 2994 bp, Zea mays
gggagttgagaacatggatggtttcgttgctcaatgggcaactttacatgagcgtggactttgaaaagtcacgtgaagcaagaactttccgtatcttggcccctaagcagggttctgctcctagctagctttaggattagttttctcaactactcatgtctcttgactcttgcatacatcctatttatttttccgagaaaaagaagtttcctcaaattttatttcttgtgttgatcgtttcgtagcagtaaaaccactcgcataaagtccttggaaaaatagtaaacgaaacagcgtagcgtggtggatggtaaaagaaaagtaaaactttgcgcccgcctatacaaaaccgggagcgacgggacgaccatgtcggtgagaagagaatattccacagccagtcggtccaagctggacagcaggaggacagacaggcagcccgcagccgccgccgccgcagcccgttccgttctcctcgctctcttttcacttgccaacgccaacgccaactgcttcttgtgcaattgggtgtgcttgctactgctcgctccccccgcggccgccctcgcttgctccgggcgccaccgtggggtcctccccccctgctctcccacacccaccctgtccttgtcgtccgctctgcgcaaccaaaccggagaaaccgcccccctttcactccccctcctcctccagatccatccgcctctcctcgaaaccgtctctctgtgcgtccggagtccggggagagggtggcggcggtggagatggagagcctggcgcagcgcgcggcgctgctgcgggagtcgctgcagaagagccagcaggtcaccgacgccgtcgtctccatactcggctccttcgacagccgcctcaccgcgctcgactccgccatgcgccccatccaggtgaggacgcacgccgttcggaccgcgcacgagaacatcgaccgcacgctgcgctccgcggatgtgatcctcacccagttcgacaggacccgagaggcagagcgtgaaatacagaaggggccgcatgagaaccttcaaggtttcctagatgcagttgatcgcttgagaagtattgagcgtttctttagttcaaatcggagttaccgtagtagcgatggggtgctcaaccacgtaaacgcgctcctttctaaggcccttgtcaggatggagggtgaattccagaatcaattatcccagcgcagcaaaccgatggagcctgatcgtctttttgattgtcttccaagtacacttcgaccatcgtctgaatctcagcccgaaggtgggaaaaacccatccgagaatcagcaaaacccagaggctgttgtatatagtcctcctgctcttattgagccaaagtttgttccactactctctaaattagcacaacagttggttcaagctggatgccaacagcaatgctcagaaatatatagtgaagctcgttcttcagctttagaatcaagtctgaagaacttgggcgttgaaaaacttagcaaagatgaagtgcagaaaatgccgtgggaaattttggagtctaaaatagggaattggattcatttcatgcgaattgctgttaaacttctttttgctggggagcgccaactttgcgaccaagtttttgagtgcagtcaatcgttgagggataagtgctttgctgcaataacaaagaacagtttggctacactactcagttttggagaggctattgctatgagtaaacgatcaccagagaaactctttgttctgttagacatgtacgagataatgtgcgagcttcaaacagagattgataccattttcgttggagaatcaggttcgcaaatgcgcgactctgcactgagtttaacaaaatgcttagcacaaacagcacaaaagactttcagtgattttgaagaagctgttgaaaaggatgcaacaaagaatattcatactgatggaacagttcatcctttaacaagctatgtgatcaactatgttaagtttttgtttgactaccagtcaactctaaagcagcttttccaggagttcaaggaagatgggacaggttctgagctggcagctgtaacaatgaaaatcatgcaagccttacaaaataatttagaagcaaaagcaaaacaatacaaggatcctgcattgatgcacatatttttgatgaacaacattcactatattgtcaaatctgtccgcagatcagaagccaaagatttgttgggtgatgactggattcaaaggcaccgaaggattgtacaacaaaatgccaatcagtatagaaggattgcttgggcgaaggtgttgcaatgcctctctggtcaaggtttgacttcatcaggtggtagtggtcatgtaggaagtgatggtggcaatagcagtggagcttcaagaacagctgtgaaggagagattcaggtctttcaatgtgttgttcgaagagatctaccacaagcaatgtggctggtccgttccagacactgagctgcgcgagtcactaagactcgcggtcgctgaaatcctgttgcctgcctaccgatcattcataaaacgttttgggcctctcattgagaatagcaaagcacctgggaaatacgtgaagcacactcccgagcaactcgagctgctgctaggcaatttattcgaggggaaacaagaacgtgcttgatagtttggtaccgcccgcagcaaggatgtgctgctcttcagcttctatgtaaaatacaaaataataaaaataaaaaagatctggaggccctgttagcgttagcattgcttgtgttctccccaatccttgtttagccgcattattatttgtacagaagaatatatgtgtcagctgtgccttgtgttgatctgatagcaggcgtgttcctggtttctctaaaaaaaaaaaaaaaacattcgttcgggtggagcactaagatggcgacccatctgtagtttttgagatagaaaaatacttccccctcgtcgttatttattttcggatggtgtacgcg

SEQ ID NO: 5303 - DNA, 2923 bp, Zea mays
ctatatatatatatatatatatatatatatatatatatatatatatatatatatatatatatatatgctaaaataatgtcattttaagttctcagacgatgttaaagctaaaaagtttcaatcaacctcaaatattgacatggactacagcaaagctctgttctcaaatatagcccataaaattatagctgaaagttgttaatttagacttgtttagagtccaaaatgtgttttacttttctaggttttgaaattttcaaagaacgtacattgaatgttcacatgatatggttaatataccgaagttgtggcgtggctaacctgatctacgagcatgttattcataagttcttgtgaagttgcttagagtctcaaatattagttttaaactcatatatgaggtctagctaattttttgtttttgttttttggaaaaaaacaaacattctctaatgggagataggtcctacaccaaaattgtatgataagatttagaactttatagttaaaacgtttttattatatgtatacagctgccatgcatgagcaacaatcagttatagcaattccaaaaagaatgtttattatatgcatgtgcagcgcgacgtctggggttcaagatgagtccacctgcttacctctcgttgacaccggtatcaaagtttgacctgttcacgtgccgaattggtgccaattacgcgtctggcggatctggcattctcaacaccacggtatatatggctccgacacgaagctgttctttttattcagcataattaagctgtcgtgcatacactacacatagttttgcttctcatgatgagtcgtacgtatacacaaatatatccccatcaccacaccaattactaataataattactggtaatttaattgtgtatgcagggaaacgggacactcacgctgcagaaacaaatcacgctgttctccaaaactcaagcaagaatgtcgtgggcccgctgcaagctcaggtctatggtatcgaggtccttgttccttgtcagcgccggcggcaatgacttctccgccttcagtgaaatgggcatgggcgaacaagacgccccagcctacatcagtagcatggtctcaacctatgtccagcatatcgacgtacgtgtgaggcgggaccatgcatcaaatctgtcattgcacattaattaaaggtctcgatgcaataattagtggacgacatcgatgcctgcaggcgttgtacaagttgggagcacggaaggttggggatcctagacgtgccagctatcggctgtaccccaggctccagagtccccatggccaacggcggatgcaacgtagcatggtctcaacctatgtccagcatatcgacgcgttgtacaagttgggagcacggaggttggggatcctagacgtgccagcgatcggctgtaccccaggctccagagtccccatggccaacggcggatgcaacgacgctgccaactctatggcgcagaacttcaacaaactcctaaggctcgaggtggcgaaagccgtcgcatcctccatgcccggcatgagatactccattgcaagcacctacaattttgtcaccgacttgatggacagccatctagtggctgggctccgggtggtcgacagggcatgctgcggatcgggaaaactgaacgccgcggtcatgtgcgcccagccaaacacgacttactgttcggatcgcgacgactacatgttctgggacatgctacatcctacgcaggcaacaaatgaacgtggggtggtcgccatcttctacggcccgcaggagtacgcggatcccatcaactttgcacagttggccgctgccacagcaaatgatgatgatgatataaatactgctatgaccgcaggcgtctatgccgccatatgataaacactatttatgtcgattggcatgcagctgcgacatgtcactacctgagtactatatacgtaattcagttggaataatgtacgttgtgtgcatcatcagtctctctctatatatgctggaaataaaatgaggacaagagaccacaagaaaatgttagaaaaagtgtcagttaatttccttaaatgccccctgcctcggacccgcggcaaagtctattttacactcggcaaaggctttgccgagtgtaacactcggcaaaaaacgctcggcgaactgtacgtcggcaacggtatctttgccgagtactttttgtcgggcactcgacaaagaatttgtcgagtgtcgtttgacactcggcaaagaaaagtcactgtcacggcgccaagtgccgtgacggtgacagatcctttgccgagtgtctttttggcactcggcaaagaggccaattttgccgagtgtctgctatcgtggccctcggcaaagacgggtccagtgggccccaccgccagtccctgtgccgagagctctcgtaggcactcggcaaaggaggactctttgccgagtgtctagtggaccggcactcggcaaagagtcctccagtgggtccctttgccagtccctttgccaagtgccttggcaacagcactcggcaaagatggctttgccggttcccaggtttccttctttgccgaatgccatggtcagcactcggcaaagatggctttaccggttcccaagtttccttctttgccgagtgccatggtcatagcactcggcaaagcgaccctttgccgagtgttacactcggcaaagtgaccaggatgtccctttttatttgtttttgctgtttcatccgaacaaacaaaagatatatatcattcacatcacattatatatcaatcgcatcacagaatgaacacatttatcatcaacaccatatatatcacaaagtctcactaatataagtctcacaaatataagtcaggatcatcacaaaacagatataagtctggatcatcaaag

SEQ ID NO: 5304 - DNA, 1595 bp, Zea mays
  misc_feature (1373)..(1373): n is a, c, g, or t
agatctggaattcgcggccgcgtcgaccgatgcgtgtcccgatccaacggtctccgtcgtcccgtccgcgtgataaagcgccggcgcctcttctcgcgtggcctcccgaaggttctaggctcgattgaacaaattggagcggcactacactcctccacgcctccacctccagcctcccactgatctggcctctctcgagttaatcctagatcaatatgagaaggggctacagttacagtccttcaccaccaaggggctacaggagaagggcgcgcagtccaagtcctcatgatcattatggtggtcgtggtagggatctcccaaccagtcttctggtcaggaatctccgtcgggactgcaggccagaagacctccgtcgcccatttggacagtttggtcgagttaaagatatatatcttccaagagattattacactggacgcaacacaagcctaaaagattattgttgaagagaaggaagaaatagagaaattcaattaagtgatctgcaacttaaaagagtactcagtactgttcaagagatgggaagaaatagagttacaagtttaagagatactcacatcatgaagagtttcaagtctgaatttaaactctcatgagtgcaagggatccccgagggtttgggtttgtccagtattatgatcctgctgatgctgctgatgcgaagtactatatggatgggcaggtagttcttggtaggcaaataacagttgtttttgcagaagagaacagaaagaagcctcaagagatgagagctagggacagagtcaggggtcattcttatgatgacaggaggtattctcgctctaggtcgcctcgttattataggggccgctctccttcacgcagccaaagctactcgaggtctccacctcagaatccaagacacagacttagagagaggtcctactccggctcacctgtggacagcagatcaagaagtgggagcccttatgaggatggatatcgcaaatcatcacggagagagaggtctctttctgtcagcggatgaagcagttttacggtctagagctattgctgtgaatctgcgcatggtggcctacttgctatgtctttatgaaccatatatgttctgtctagattatcattcccagtaccagagaagtatcgtgagactgtttgctgtactttctagtcttgaggatacagaagggggtcaccgattctctcagtagatggactattgaccactagctacgccagttccactgctttgtgtatttacaggcagctttgcggtttgaataaaattgtttgcatcggggaaagctaataaaaaaaaaaaaaaaaaaaaaaaaataaaaaaaaaaaaaaaatttttctatcccctncacccccgggggggggccccggaacccaaattccccccaaatagggagctataaaaaccgcccgttcccggggggccgctttttaaaaaacacgcggggggggagaaaaaacccccggtgggaccccccccaattaataccgcccgtggtagaaaaaaccccccccttttttttcggggggggtggagaaaaaaaaaaaaaaaacgcgcccccccccccccc

SEQ ID NO: 5305 - DNA, 2705 bp, Zea mays
  misc_feature (2672)..(2678): n is a, c, g, or t
  misc_feature (2686)..(2691): n is a, c, g, or t
gggtacctcgaggccggccgggacgaactggcgtgccagtgccagtgccgagcgcccgagcccttactcctcttcttccgaccccccgctggcttggaaaaaaggggaagaaaactcgcgcagtcggtcaccgaagggaggagcgcggtcgaggtgccgcccacacggagctgcgaggtgtttgtaggatctcctaggtgagcccctgctgcttggagacagccatggccaccggcgtggctccagctcctctcccacatgtcagagtgcatcatgggggcgtcgggttcaccaggagcgtcgattttgcgaaggtcttgtctgctcccggtgccggcacgatgagggcaagctcctctagaggcagggcgctcgtggcgaagagctctagtactggctcggagaccatggagctcgagccatcttcagaaggaagcccacttttagtacccaggcagaagtactgtgaatcaacacaccagacaaggaggaggaaaactcgaactgtgatggtggggaatgtgccacttggcagtgatcatcccataaggattcaaaccatgacgacttcagataccaaggatgttgcaaaaacagtagaggaggtgatgaggatagcagataaaggagctgatcttgttagaataacagtccagggtaggaaggaagctgatgcctgctttgagatcaagaacactctggttcagaagaattacaacattccactagtggccgatattcattttgctcctacggtagctctaagggtggcagaatgttttgacaaaattcgtgtgaacccaggaaattttgctgatcgtcgtgctcaatttgaaaagctggaatatactgacgacgactaccaaaaagagctagagcatattgagaaggtgttttctccattagttgagaaatgcaagcagtatggaagagcaatgcgaataggaacaaatcatggtagtctttctgaccgcataatgagctactatggtgattctccacggggaatggttgagtctgctttggaatttgctagaatatgtcggaagttggacttccacaactttgtattttcgatgaaagctagtaaccctgttatcatggtccaagcatatcgcctgcttgtggcagaaatgtataacctaggatgggattatcccttgcacttgggtgttacagaagctggagagggtgaagatggaaggatgaaatctgctattggcattgggacactgctaatggatggtttgggtgatacaatccgtgtctccctcacagaaccaccagaagaagagattgatccttgccaaaggttggcaaatcttgggacgcaggctgcaaaccttcaaattggggtggccccatttgaagaaaagcacaggcgttattttgatttccagcgtaggagtggtcaattgcctttgcagaaggagggtgaggaagttgactacagaaatgtcctgcatcgtgatggttctgtactgatgtcagtttccctggatcagttgaaggctcctgatctcctttataggtctcttgcagcaaagcttgtggttggcatgcctttcaaggatctggctactgtagattccattcttttgagggagctcccccctgtagaagatgctgaagctaggcttgcactcaaaagattagttgacatcagcatgggcgtactggcccccttatcggagcagttgacaaagccactcccacatgcaattgtacttgtcaacctcgacgaattgtcaagtggtgcacacaaacttttgccagaaggcactagactagctgtcactcttcgtggtgatgaatcatacgagcagctagatattcttaaggatgttgatgatataacaatgttgttacataatgttccatatggtgaggagaagacaggcagggtgcatgctgctaggaggttatttgagtacttacaggccaatggcttgaacttccctgtaattcatcacataaatttccctgaaaccattgacagagatggtcttgtcattggtgctggggccaacgttggtgctctcttagtcgatggtcttggtgatggtgtattccttgaagctgctgaccaggaatttgagtttctgagggacacatctttcaacttgctccaaggttgcaggatgcgcaacacaaaaactgaatatgtgtcttgtccttcctgcggccgaacactctttgaccttcaggaaatcagcgctgagattagagaaaagacctctcatctgccaggtgtctcgatcgctatcatgggctgtattgtcaatggaccaggagagatggctgatgccgattttgggtacgttggaggcgctcccggaaagatcgacctttacgtcggcaagaccgttgtgcagcgcgccatcgccatggaaggtgccactgacgccttgatccagctgatcaaggaccatggccgatgggtggatcctcctgccgaggagtagggctgtaggctgtagccaagtctgtagtttatatattctgtaaagcgaaacacgcaatgcagtaactgagcatacgatgtacatccctacacattttgtacatttattgagatctgagaaataaactagaaaccgtcggtgacggcatgtctgcagcaccccaaaaaaaaaaaaaaaaaaaaaaaaaaaaaaaaaaaaaaaaaaaannnnnnngggggggnnnnnngggggggggccccc

SEQ ID NO: 5306 - DNA, 1836 bp, Zea mays
gtatagaaaacggggctgccacgcgcgccggccgggacatccattttcatccctagctgtggtcccacaggtcgcaccattctcccctcttcttccgccgatacacacgccctgcacgggggctcgccgaggcttcagtttactactgaagcacgcaccgcagcgtctccaccttctgctcaacctccgcttccgtaggtgccggcgctaagcgaggatccctccgttcatcggtcccgacggcacctcgactcgtttcgtcggtcgctgtggcgacgggtgattgactgcgatatgaggcaatggttatgttgtaactgccactttgatgacgaggaagatggccatgacaaggaacaggccaaagctcagagcaataagatagaccccaagcagaagtcttcaaaacctcctgttagtcaacctgagccagagttctcccctccaacaattgatgttcctgaattgtcattggatgatttgaaacaaaagactgatgattttggatcaagtgctctgattggtgaaggttcttatggacgagtatatcatgccgctttagatgatgggaggcaagccgcagttaaaaaacttgatgcatctgaaaatgagcctaatgatgagttcctcaaacaggtctcactggcatcaaagctaaaacatgaaaatcttgttgagatgttgggttattgtgtggatgggaattatcgtatacttgcttatgaatttgcaaccatgggttcgcttcatgatgttttacatggaagaaaaggcgttcaaggcgcgcagcctggccctgtgcttgactggatgcagagggtcaaaattgttattgaggctgcaaaaggtatagaatatctgcatgaaaaggttcagccttcaatcatccatcgggacatcagatcaagcaatgtactgctgtttgaggatttcaaggcaaaaattgcagacttcaatcttttgaaccaagcaccagatatggcagctcgtctccattcaactcgtgtattgggaacttttggatatcatgcacctgagtatgctatgactggccagctgacacaaaaaagcgatgtctacagctttggcgtggtccttttggaacttttgactggaaggaaaccagtagatcacacaatgcctcgaggacaacaaagtttagtcacatgggctactccaaggttgagtgaagacaaggtgaagcaatgtgtagatcccaggttgaagggagaatatcctccaaagggagtcgctaagcttgctgcagtggcagcactgtgtgtgcaatacgaagcagagttcaggcccaacatgagcattgttgtgaaggcgctttcgcctctccttcaacaaagacctgcaccaggcaccgcagagccagccccgcaacctgtgagctgaatccagtcacgtgtgatgggacctcgcagcatcaggcatctccgcgatcattcaatcagcaagtcattgagagtattttgaatatttgttctgtagcattctgttcctggcttgatgttggcgctgcacaatgacaatggtatatgcagtaggtttgatttttctttttcttttaccttctctataccagtaccaagttaccaactgttcgtagattttcagaattcgctgcttgaagaatagatgcaggatgatctggattttttttttggtctggcgtggcgttgctgccttctcttccatggttaccaaataccatgattgaaatcaagtcacttctactttgtttgaagtcaaaattcttatactttgaaaaagttcgtagaaaaaaccccaaaaaaaaaaaaagaagggcggccgccaacaagtgagctc

SEQ ID NO: 5307 - DNA, 1287 bp, Zea mays
gtaaaatatggatatggggagggtgtcaatgggtaatacccattacacccatacccactctaaacatgagagatggtgatggtgaaggagatatgcgggttcagtgaggcggagacggcaaggagaaaaggatggtgcagacaattgctgagtaggcatcagctagtcagccgaggccgggtgatgcacatcggcggcacggaagaatgccagcatcactgcccagcagttccctggcaacaacttatatctcagttctctgtgtgctctccatattgatcttttgttcaattgaatatcttctgttgatgtcaaatgcagcaccttgatcaggaaggtattgggttccgcgggcccgccccgtatgatgataatgctattacaaatgcggttgagatatttaatacctctagtggcgccgttcacttcatggcatcaaataacgactctggtgtgagatactatgacatggagagattccagctattcaagcattttcagtttgaatggccagtgaatcatgcttcgttgagtcctgacagaaaggtggttgttattgtgggtgatgatcctgatggtctacttattgatgcaaactctggaaagacagttcattccataaaaggacatcgggactactcatttgcatcggcttggagccctgatgggcgaacatttgctaccggcaaccaagacaagacatgccgaatctgggacgtgaggaacctttcaaaatccgtccatgtgttgaggggtaaccttggagccatccggtccatccgcttcacctcggatggccagttcatgtccatggctgaacctgctgactttgtgcacatctacgacgtgaagagtgactacaacaaaaggcaggagctggacttctttggcgagatatccggcacatcgttcagcccagacactgacacgcttttcgttggtgtgtgggataggatgtatggcagcctgctacaatttggccgcctgtacaactactcgtatcttgactccctgttttgatgtggatccaaacgggtgttgaactgttgggttttggtgtacctcagtgccctgaatgttgtcagcataaattaggtggttatccctaatcaggatattaagttgcaaagataattgaattaataaatgttgtaccgtgcccgatgtgtatatgtaaaaagaaatgtatacatgtgcctattgagagaccgagttgagatgtgacttaggggttgtttgtttgggattataatctattcagattatataatctaatttatttgtttt

SEQ ID NO: 5308 - DNA, 2557 bp, Zea mays
ttttttttttttttttaccatatcatccagactattaaataaatccaaatgaatctccgtcgaaacctttcacagactataccaggacgcaagatccaacggactgaaataaattaataactaatcagaagctcaggctacactagatgcagacacaagctgagttgattatagaaacgaaacccgacatgaataaatgtttccagcaaatttaactggaaacacacctatacaaaggctgcttctgtatgtacaaatcatctaaaaaaacgttaggctacataaagtagctcaacggtgtcttgtgcctcgacccgccttctccgtagaggtcgttccattgaacgagctcattcatattttttgaatccgatgatatactcgcacaaacctgctcatgtgcgtgcttgaaatcactaaactttagggagcgaacgtcgccgctacagcactgaggtggggctggcctattttctgcttcagctaaggttctctccttcttctctctttcaagaatttcccttatgggacgatgtgctgcagttatacacaggttcttcagatcactgcctgaatacccatctgtcaggtttgctagcgcctccagatctacatcatctgccaaatcttcttttgctagtatcacgctaagaatcttctttctgttgggtgcatctggcaagttaaccatcaacctcctggggagcctcctgacaacagcctcgtcaagatcaaatggcctattagtggcagcaagtaccagaacacgttctttgtcttttgtcctaagaccatcccagttcaccataaactcatttttcatcttgcgcatggcctcatgttcccctggattctcacgtctacccagcatgccatcaacctcatccacgaaaataacactaggagaaattttgcttgcaagtgaaaaaacagctttcacatatttttctccctctccaaaccactttgaagcaatgcttgacattgatatgttgataaaattagcaccagcctctgttgcaacagctttggcaagcatggtcttaccggtgccaggtggaccaaaaagcaatatccctttacatggcttcataagttgtcctttggagaacaactcaggcctttgcaaaggaagcataactaactcctgcaaagtttccttgacattttctaatgctccaatatcctcaaaggtaacaccaatctcatctggagggatgacatctggaagaagacgtttttcaaattcattctctgtgacaacatccttgagtgacttctttgtgctcttcttcttagggccactttggatactttccaacaaatcaattccatacttaaggcttacaccggaaaggacaactctcgcatcctttccaggagtttgaatagggtgatccttgagttgataactcaaagcataaccaactattttatcgacacattcgcttgtcagattacgatctttgacacaaaccactgattctaaatcagtacattccataccatggcgggttagaaaagattgtattttcaaaaaattagcctttgccttaagaatttcaatgtcacgacccaatagctgtttccactgggagagttccgtttcatcctcaggtgattcaattgtcactttatttgggaaaagtttagttatatgctttgacatcttgagtgcttctttatttttttcacccacccgaccaaagctatcctgaaatgcaaggtcaagtattgctgcttggctgtatgagaacttgagccaaggagacccattgtttgacttatctttccgagcatctgtctgaatctgggacccaacaataaaaactccagctgggaaactttcaagcttattctttagaccatggtaggtgtaattatttccacatattttctcaacatccttcagaaataggattacaggcacctgttgactttcttcagaggcaaactcaaacacaacatcaaatgaatgtttggctctatcttcccatcctggaccatcgaggcatagagaatcaactgaacagaataggccatgatcaagctcacaactgcctccaagatcaatgcccccggggatctgtttatcaaatctgactccaacttttgaggatccattttccgcaaaagtaagcctcacttcaccctgtgaaccataatcaggagctctctgtccctcaaacataaaccctgatgattgaataggaccaatgtacctcaccctatcaccttttttgtatggttttgattcctttgactttgaaggctgcccaccagacagcagtgaataatctatgacaagcagcttagcaccaaaggatttggtaagtgccttaaccagtaattcttggtagatctcggaccctggtgggccagataatagtacccttttacaaagagaagatatatcctttgtccacttagtggattccttgcagcatagatttacatacgatgatgacaaaagaacatttttggtattttcactaagataatatggaaaattatcaaatgattctgatatatcacttgcacttatagctgctttctt

SEQ ID NO: 5309 - DNA, 2262 bp, Zea mays
aattcggcacgagggctgtatccagagatggtgtgaagcacacacaattctactctgcgcagggtctgtttcacttgccattttggataggatcgctcgttttggaattaactttatgctaacagaatctaggtgtcattaagctagattaagcttgctgcttgacttagtagtgtaaatctgtaaagaaaattacctggtttgggtttagtctctataaaagaaatggaacagaggaatgttctggcattgggtgaacatgttctaaaagctactgtttggaagcggaagcataagactgctatggagcaccctgaaggcaatgatgtgatggtgttctctcagcatgatcaaagaaagcaccctgtgatatttgacgacagagctaaatgtaagaagtctaaattaatttcctgtgggagtggagttatattggagtcatattggaactttaagacaagtgggctgcctgtgcgcgtgcttttctaccaacatggtgactggagtgattttccagaggatgttgtaaatctagcacaacaggacttccagttgaagaagccaattacaactgctgtgttccagaacaagcacatcctgttggacttcattcacatgatttgcatagattatgagatgaccatagacaaaccactagcatgggttgatgataatggcaaacgcttctttccagatttatctgctgggctctacacatctaaaccatctcagcatgagaatggtgaagctgatgagtgtgatggaacgcctacaagtgtagctgaaagttctagttcggtatctgttggtgaagtagtttctcatggtaagaggatcaatgatattgcagaggacaacatgagagcacataacatattgtatgaagctgttggtgaaaatatttcaggtccttcattccatttgaatgaatattctagtggaaccatacaagctactggcaagccaaacgattgtcgacgtattgattcagctgtgcggaatttgttgctcaaaggattaggtcagccgtttagtgaggaagatattattggtatctatagaacaccactgctagatcagcgagggcaagttcgttgtggtctcttccagaaggagatcgaagagaccaggagtcgtcgggggaatgcaaatgtacgttatgcttggcttccttgctcaagatataccatggagcagatggcaatgcggggtgctctggaaatcgcgaagcctcataaggggtccatttgtggtgttgggacttgtcttgctcctgcaaactgtacaaattcatgtgccagatattctgattttcatgaagatggcatcatcagaatgatgttgtgccgtgtaataatgggtaatgttgaggttgttttgcctggatcaaagcaatttcagccatccaatggaagttttgataatggtgtggatgatcttcaaaatccacagaattacatcgtatgggatgctaatgtgcataaacacatatatgctgaatatgctgttattgtccaagcacctctcgtgaccaatgaatgttcgggcttgaaggatagcgtgcccaacatatctgagatcataagttctggttctcgagacaatctaaccaaggaggataggttcgcgccttgtggtgtcgaacaagaagcacctaggctggggcgtgctccaagggccccctcctcaccatggatgcccttttcgatgctttttgctgctatttccacgaaagtgcctcgttcggacatggagttggtcatcagatactatgaagaattcaagaggaagaggatgagccggagcgacctggtggtacggatgaggcaaatagtcggtgataagatattggtttctacaataatgaggcttcaccaccagaagaagcccccatcgatggcagcagcagcagctgggctagcaagagcactcgcaaggggggaagagggagggggagtagccgagtaagattagtttaagccgccttgtcttttgagaaatttatggagcacatatgctttgtcgacatggccagacccaaggtgtcaaaagggagggagatgagctgagcaactgttgtagtgtagtctcaaactcaaagcgtttaggtcttgacatttgacaaactaaaactcagaaacattatcatgagtagtgttttttttttcgtttctctttcctggatttaactattgttattgctatttcgtggatatctgggcactgaaggccgtgctattgttggtttatgatggtatgatt

SEQ ID NO: 5310 - DNA, 2483 bp, Zea mays
cattgggtacctcgaggtcggccgggaaagcagatcgccacgccaccaccaccccagctcactcgtgccgtgcactcgacccgtcccccctccctccactcgatccacccgccaagacctcccattgccgccgccgagccagccagggggggagaagagaggccagccgcgtcgcggcgggcggaggaggaggacgagcgggagagccgagccgagccggccgggcaggatgttcgggcgggacccctggggcgggccgctggagatctccaacgccgactcggcgacggacgacgaccgcagccgcgacctggaccgggcggcgctgatgcggcagctggacgagacgcagcagagctggctcctggccgggcccggcgaccaggccggcaagaagaagaagcggtacgtcgacctcggctgcctcgtcgtcgaccgcaaggtcttcatgtggaccgtcggcaccgtcctcggcctcggcgtcttcatcggcttcgtcatcatgatcgtcaagctcgtcccgcacaagcgccccccgccgccgccgcccgaccagtacacgcaggcgctgcacaaggcgctcatgttcttcaacgcgcagcgatccggcccgctgccgaagcacaatggcgtgagctggaggggcaactcctgcatgaaggacggcctctccgacagcaccgtccgccggagcctggtcggaggcttctacgacgcgggggacgccatcaagttcaactaccccatggcatggtccatgaccatgctcagctggagcgtgatcgagtacagggccaagtacgaggccatcggcgagctcgaccatatcagggagctcatcaagtggggaacggactacatcctcaagaccttcaattcgtctgccgacacgatagacaggatcgtcgctcaggtgggtgtaggtgacacctctaaaggcagcagtcagcctaacgaccattactgctggatgaggccagaggacatcgactacaagaggccggtcaccgagtgccactcctgctcagatctagcgtcggaaatggctgccgccctggccgcagcttccatagtgttcaaggacagcaagacctactccgacaagctcgtcaagggcgccaaggccctgtacaagttcggcaggctgcagcgtgggcgatacagccccaacggatctgaccaggccatcttctacaactccaccagctactgggacgagttcgtgtggggcggtgcgtggatgtacttcgccacggggaacaactcgtacctcaccgtcgccacagccccgggaatggcgaagcacgctggagcatactggtttggaagtccaaactacggagtgtttacctgggatgacaaacttccaggagctcaggttcttctcagcaggctgcgactcttcctaagtccagggtacccttacgaagaaatactgaggacattccacaaccaaaccgacaacgtcatgtgctcgtatttacctgtattcaattcattcaacttcaccaaaggaggattaatacagctcaaccatggaaggcctcaaccgcttcagtacgctgtcaacgcagctttccttgcttctttatacagcgactatcttgaagcggctgacacgcctgggtggtactgtggaccgaacttctacaccatagaagtcctccgcaagtttgccaggtcacagcttgactacatccttggaaagaacccattgaagatgagctacgttgtgggtttcggaaacaagtacccgaagcgccctcaccacagaggtgcgtcgatacctcataacggcgtcaagtatggatgcaaaggaggttacaaatggagggacacgaagaaggcaaaccctaacatccttgttggagcaatggtggctggccctgacaggcgtgacggctacaaagatgtccgcacgaactacaactacacagagcctacccttgcggcaaacgctggcctggttgcagcactgatttctatatctgatatcaaaaccggacggttcggcatcgacaagaacaccatcttctctgcgatccctccgatgtttccgacaccaccgccgccaccatcagcatggaaaccatagagagacagacctctgaatattccccccccccccccccccccaaaaaaaaagcatcaacacagggaagtggagcaaacatatgatcagttggtacagcaaaggccaggaacaggaaagcggacagcataagcttatagagcttctatttctgtaccagtgtgacagatcagtataaaatcctctgtcatacatagaccagaagttgtgtgcatcgcgtgaaagctaatttttggggtcttgttgctgtgggcattcctgctcatgtgtgaagttattttttgtagaaattgtacctttacaaattgttataggagtgacttttcatagtagtaaagcatttgtgtgacctgtaacaaaaaaaaaaaaagagatggtacagaaaaaaaaa

SEQ ID NO: 5311 - DNA, 1983 bp, Zea mays
aaatgtatgctgtgcgcgcacagccttttcttaaaaaaaggaaaaaagaggcacaataaatggcgtcaaagccacgggccttcgcgaaggtcttcctccccgcgctcccgccgccgcccctcctcactgcccccgtcttctcgcggtagccggccgacgaatcggggtgccggcgcggcggcgatgtcggctgcggcggctgcgccagcgcaggctccaaggaagtgggagggactagtggacgaggtgctcgagagggaggtgctggcagcgtgcctggaccaggcccccgagcgccgccgcatccgcgaggctttcaaggacgttcagctcagcatcgaccattgcctcttcaagggacaatatagtggcatcagaacaaaggagtcatgtgagcataactctaggggtgtggagattttctcaaaatgctggtttccggagaatcgtcgaatgagagcaattgtttgtctttgccatggttatggagacacatgtaccttttttcttgatggagttgcgaggaagattgcttcagctggatatggagtatttgcactggactaccctggctttggtctttcagaaggacttcatggatatattccaagttttgatacacttgttgatgatgtagctgaacacttctctaaggtcaaaggaaatcctgaatatagaggcctaccgagctttctgtttggccaatctatgggtggagcagttgcattgaaggttcacttcaagcaaccaaatgaatggaatggtgcaatactggtggcaccgatgtgcaagatagcagacgatgtggttccaccttggcccattcagcaagttctaatttttatggccaaacttctgccaaaagaaaagcttgttcctcaaaaggatttagctgagttggcattcaaagagaagaagaaacaagagcagtgttctttcaatgtgattgcctacaaggataaaccacgtttgcgaacagctctggagatgctgagaacgacacaagagatagaaaggcgtctagaagaggtttctttgcccttgatcattttgcacggtgaggctgatatggttactgacccggcggttagtaaggctctgtatgagaaagccaagagccaagacaagaagctgtgcctctacaaaggtgcgtatcacgctatcttggaaggtgaaccggaccagacaatattccaagttctcgatgatatcatatcctggctcgatcagcattccacaaaagaaggtatatcgttgtgaatcaggcagcgctgttcgccaggattgggtgaattcctttggcaatgctgtatcgcttccggttggggatcccagattcaacggtggggattccatttttgatatgaccctgtaaaattcttagttcagattattgatgtctccgtcatgtacctgaacgatgtagacgtacatatatgtaactgattaatgtgtatcaattgaccacgaattatttgggaaaacctcagttgcaaaacgccttttatttaatcacaatttctatccttgtgcggcctctgaaagtgagatgaactagcaataaaggaggtgttctgatgaactagcgataatggagaaggtgttgggtattttttttattaaaacctgaccccctttgcagctctcccggcgtttcacgccttcggcgccgatcactggctcgcacatgtctctcctcacgaagccatcgttgggaaccctgctttgggaatcttctatgttaaaactagtgcacgcgttcacttgaggcttggctcacggacgcgaacttttccacacggacacgacctttccagccttgccctcgacggccacacgacgcccacttcgatctcttcactgtcaccgtcccctccactcgtcttgccatcgactgcgtcctgtctgtgccgcagcgcaaggaaagtcagctcctgctacgacgcctcgaccccgcgcctctccacctcctccatgctcctc

SEQ ID NO: 5312 - DNA, 1501 bp, Zea mays
gtcgacccacgcgtccggcgagcgccacccagttgctcaagtgattccaggcccacgccacgccaaccccgggctcaactcgagtccacacgccccagcaccacccctgcctctcagtccagtcccccacccaccaccaccactcctcccctcgccgccgcccgttcccgaccgatccggccggatcgccccgccatggaccagtacgagaaggtggagaagatcggggagggcacgtacggggtggtgtacaagggcaaggaccgccacaccaacgagacgatcgcgctcaagaagatccgcctcgagcaggaggacgagggcgtcccctccaccgccatccgcgagatctccctcctcaaggagatgcagcaccgcaacatcgtcaggctgcaggacgtcgtgcacaacgacaagtgcatctacctcgtcttcgagtacctcgacctcgacctcaagaagcacatggactcctccacggacttcaagaaccaccgcatagtcaaatccttcctctaccagattctgcggggcatcgcctactgccactcgcaccgcgtgctccaccgcgacctgaagccgcagaacctgctgattgaccgccgcaacaacctcttgaagctcgcggactttggactggcgagggcgttcggcatccctgtccggacgttcactcatgaggtggtgacgctttggtatagagcgcctgaaatccttctcggtgcaaggcattattccacccctgttgatgtgtggtcagttggttgcattttcgctgaaatggtgaaccagaaggcgctttttcctggcgactctgagatcgatgagctgtttaagattttcagaattttgggcactccaactaaagaaacatggccaggcgttgcttcgttgccagattacaagtcaactttcccaaagtggccacctgtggatcttgcaacggtggtcccgacactcgaaccgtcgggaatcgatctcctatctaagatgctgcgtctagatcccagcaagaggatcaccgcccgcgccgccctcgagcacgactacttcagggacctcgagcacgcctagcaggatatggatggatggatgaaccatttcccctcccctgctccctctgtaaattacggtagcagccgcgatgcttggggccggcgagtacccccgtctgggcggccgttgagttatgtgtgttactctatagtatgactaagctggagtgcctcatgtccaccatgcagtgcagcttttttctccgacttttttttgctgcgtagagaaatgagatgagaaatgtgatccagagatccttgtgccatgggagccctagtagtagccttgtagctgtcggaggtgtcggcactggcctctcttgaacctgtatgatggctggagagagaggagagacggcggcttctctggttaaaaaaaaaaaaaaaaaaaaaaaaaaaaaaaaaaaaaaaaaaaaaaaaaaaaaaaaaaaaaaaaaaaaaaaaaa

SEQ ID NO: 5313 - DNA, 1902 bp, Zea mays
tgcatgcatgctctactgttcatggctacgagcagttattgcgctggcaacttggcactgcccccgatctccctcaccgtcaccggcccatcacctaccagctgctgcttgccattaacattaacccctccgcacgagaccattacctagaacatcctaatcgaaaaatcgaccatcgagctagatcatatcgatcgccatatatatagtagggagcggctcgcagggcaagaacgaagcagatggcggtgatgagccgccgccgcgtcatccagctcgtcctcgttggcgtcgtcgtcttcctggtggccccgcggctgtcgtggaaccttccgggcggcctcgagaagctggggctgcagcagagcccggcggcggtggcggtggcctgctgggcggctgcggtggcggcgtgggcgtacgcggtgtcccggccccggcccgtgtacctggtggacctgtccgggtacgtggcgggcgcgtcgcacgaggcgtcccgcgccaagacgatcgcccacttcgggcggtgcgggcggttcagcgacgagagcatggcgttccagaagcggatgctggagcggtcggggctcggggagcagacccacttcccggcgtcgctcatcagcgtgcccgtggacatgtgcctccgcacggcgcgggaggagtcccacgccgtcatcttcggcgtcgtggacgacctcctccgcagggcgcgcgtggcgggcggcgacgtcggcgtgctcatcttcaactccagcctgctcagccccacgccgtccttcacgtcgctcatcgccaaccgctacgggatgcggcgcgacgtcgtcagccacaacctcagcggaatgggatgcagcgccggcatcatcgccatcgacctcgccaagcgcctgctccaggtgcactcggacacgtacgcgctggtggtgagcacggagaacatcactctcaacgcctacatgggcaacaaccgccccatgctggtcaccaacacgctcttccgcgtcggcggcgcggccatcctgctgtccaaccgccgcgccgaccgccgccgcgccaagtaccagctcatccacacggtgcgcacgcaccgcggcgcgcacgaccagagcttcggctgcgtcacgcaggaggaggacgacgcggggtgcgtcggcgtctccctggccaaggagctcatggtggtcgccggcgaggccctgcgcaccaacatcaccacgctgggcccgctcgtcctgcccatgtccgagcagctccgcttcctggccaccgtcgtcctcaaccgcgtcttccgcgccagagtgcgcgcctacctgccggacttcaagctcgccttcgaccacttctgcatccacgccggcggccgcggcgtgctggacgagctggagcgcagcctcaacctcagcgcctggcacatggagccctccaggatgacgctctgccgcttcggcaacacctccagcagctcgctctggtacgagctcgcctactgcgaggccaagggacggatccgcaagggggaccgggtatggcagatcgctttcggctccggcttcaagtgcaacagcgccgtctggaaggcgctccgcacggtggacggcggcgaggagggaaacccgtggacgccggagatagacgtgctccccatccacgtgcccaaggtttcgcccatcgatgagaccacctacaagttcgctgacggcgccacgtacaagatctctcttggttaaaatatattactactattgttattattattattattattacatgattgatttctcatcatcagcatgtaacctaatcaagataatttaagaagcagcagcgcgccgttattaaaaaaaaaaaaaaaaaaaaaagaaaaaaaaaaaaaaaaaaaaattaaaaaaaaaaaaaaaa

SEQ ID NO: 5314 - DNA, 2012 bp, Zea mays
cggccgcccttttttttttttttttttttttttttttttgtttggacatcggaaggcccccacatccacagcaacaaaatcatgaaaagtaacttcagtctcggtcgtcaactttttagcagtgcaagtagcaatacgattgcagatggcagcaacaaattgaacagtatggtaccttttcatgcacaagtaaaatagtacattgttaacttcacgtaattgattatgaaacgaagaaagtgaatatttggaaacctgcagaagcatagcaccagataatcagttctctacaatgggaaaggctgatccaattttgttgttccccaatcggtagcacttgacgttcacactatacgggccaatatcgacgcggttgtcttcccctccaacaaaaaagcacaacgtgtagagtgcaacctcaaactcaggactgacgccaatcaacgtgctggataccgatttcagcacgccatgccactcaaactgaacagtcagcagctgtatctctgaatcaggcgattcaccacggcgccttggaaatatataaccttggtaatccacatttcccttggcttcttccaggtaaaactgaatccagttatggaagcctgatacctcactctccccttgtccccgtcctttgatctcaccaacaaacacatgctcaaaggcagaagagcagctagagttgccacctcttccatacaaatcaaaccatagggatgtcagcattctcttgaagtcctcgtagtcctgaggcacagcccccttctgcactaagtaccggtgcaagtacttaattggcgctgttctagcgatctcttcaacgaaagctatttcttcgtgcttatcctgctgggtaacaacttctttgtacccctggtgggggttgtagttatccagaagtgcgcagaaacgtgagtaggtgggttttcttagcacatcgtcgcctagccagctgaacaagctttcagatgccatatcacccttctgataaactttcttccccttgccacagtcgattatgtagtccttaccaggaacaatacggttcatatcgagctcccaaagtcggctacacgctttcgataagctattcagctcctccctggtgggctcgaaattgagtccttggtggatatgaccgacatcctcagagtacttttgttctgatggtggctttctgtatccattccatgcttcagactgctgtggtcttccatggcgctttttctcaccgacggtctgccagcctccatcgtttatcctttcttcttcctgatgctgattcccgtatccttgtgcctgctgctgttgctgacgccgccggctgccactgccatcccacctttcctccccctcgcactggttctgccggcctgcgtggtgctgctgctggttccgaccatcggcccttttccaaccctcgtcatccctcctctcatggcgattgtcccgccccgagcttcgatggtcccggcgctcgtccggatcgctgcccttctgctcggagacgacctcggcccacgtcgaccgcgatcgttcgtcgcgttcctcctccccgtcgtcatctggatcggagctttgggccgccctcctcctcggcacctcgtcgtcgtcggcgcggccgtggtccctctccctcacggcgtcctccacggcgtcgatggccacgtggaccaaccccttgatgagaccctccatcgcgcgccgacgagagcgaacggggaaggcgggtgacgggctgggtactggagatggatcggactgaccggctgccgcgggatgggatctgggacggggagggacgcgtgcttggttggtggactccactaatcgagtggctggcgctgcgacgcgcaggagatcatcggggatttccttacttggatttatcgtccgtgcgtgattactgattaagaacctgaagaagaaacttttgcagcggtcgtggacattcgcggtatgggccgggtggctggatgcgatcgcgggaggaccccccctcgagc

SEQ ID NO: 5315 - DNA, 1506 bp, Zea mays
gggtacctcgaccgggactcattcggtgccgcgcgtctactgctgatggaggctatggatttcaccgtcgccagcgccgacacggggtgccaggaacctccgaatacgctggtggactgggcgctggagatcctctccacagccgatccggacgagaaggcccgcctcggggacctcgccgcgtcgcggtggctgcgcggcgacatcccgcttccctacgacccgtcccgccccgcgcgcccgccgcccgaccgccccgcccggagcgccgaggtgcggctgctcccgccgtcgcggatgccgaagctgggcaagggcggcagcgcgcagagccgtttggccatgctccactcgctggcgcacaccgagagctgggctgtcgacctttcctgggacatcgtcgcccggttcggcgcggccatgcggatgccccgcgacttcttcgacgacttcgcgcgcgtcgcgcaagacgaggggaggcactacacggtgctctcagcgcggctgagggagctcgggtcgcattacggcgccctcccggcgcacgacgggctatgggactcggcgatgcgcacctcgcatagccttctcgcgcgcctcgccgtcgagcactgtgtccacgaggctaggggattagatgtccttccaacaaccatatcaagattccgagcaggtggggatgagcaaacagcaagactactagaagatattatttatcctgaagaggtgacacattgctcagctggtgttagatggttcagatacctgtgccttaggtcccacggtaatcacccaacctcatgttcagttcctggactggaaccccgttcctctgggctgccgggggatggcactgctgatggtaagacagctagggaggctgaaggtgaacctacacccaaactggcgaaagacgtcaggggtgacgacaaaatggtccagcaggtggaagatgaactgccatccaggattgcacaggatgctaatggtcgatctaaggtgaccgaacacgtcgaggacggattagcaaagtgcaaacttgatgacagtattgagaaatacgaagagttggtcattaggactttccacagggtggtaagagagtattttcggggacccctgaagccgcccttcaacacggaggcgaggaaagctgccggctttgagcctgcctggtatgaacccctggcagtgaaggaggcatgcatagagggggagacaattgagtgatgaatttgcactgttgttgtagtgtctgtgctatgtagcaggctagaaggcatatttgaaaatttgctgcgactagcgttccagtaccattatttgtttagcagatggtgcggcgctgagccttttttctaatcatgtttgtttgcttgccatggagacgcatgaacctatctgtgtgaaagcctttgttcagcttgacgtgggcttggagtgtgaaaaaaaaaaaaaaaacctcaaaggacgatgccaattgaggctggatttcaattaaaaaaa

SEQ ID NO: 5316 - DNA, 1687 bp, Zea mays
agaagtcggaggaaaaaggagtccctcccaacctcgcatcgctgttcccccaaacccaaatccaaagcaagcacttcgtcggcgggcggcggccgagggcgaccatggggcagggcactccgggagggatgggcaagcagggcggcgctggcgaccgcaagcccggggacggcggcgacaagaaggacaagaagtttgagccgccggccgcgccctcccgcgtcggccgcaagcagcgcaagcagaagggcgccgaggcggccgcgcgcctccccaacgtcgcgccgctctccaagtgccgactccgcctcctcaagctcgagcgggtcaaggactacctcctcatggaggaggagttcgtcgccgcgcaggaacgcctccgtccccaggaagacaaggccgaggaggaccgatccaaggtcgacgacctccgcggcacccccatgagcgtcggatccctcgaggagattatcgacgagagccacgccatcgtctcctcctctgtcggacccgagtactatgtcagcatcctctcctttgtcgacaaggaccagctcgagccgggatgctccatcctcatgcacaataaggttctttctgtagttggtatattgcaagatgaagttgatcctatggtatctgtgatgaaagttgagaaagcacctttggaatcttatgctgacattggtggactagattcccagattcaagaaattaaagaggctgttgagcttcccttgactcatcctgagttgtatgaagacattgggatcaggccacccaagggagtcatattatatggcgaacctggaactggaaaaactctactcgccaaggctgttgccaattcaacatctgcgactttcttgcgtgttgtcggtagtgaacttattcaaaagtaccttggggatggtcccaagctagtcagagaattgtttagggtggctgatgaactttctccctcaatagtcttcattgatgagattgacgcagttggaacgaagaggtatgatgctcattcaggaggggagcgtgagattcaaagaactatgttggagctgctgaatcagctagatggttttgactcacgtggagatgttaaagtcattctagcaacaaaccgcattgaaagtcttgatccagccttgcttcggccaggccgtatagaccggaagattgaatttcctctaccagatattaaaactagacgacgcatcttccagatacacacatcgaaaatgacattagctgatgatgtgaacttggaagagtttgttatgaccaaagacgagttttcgggtgctgatattaaggcaatctgcacagaggctggattgcttgccttaagagaacgcagaatgaaggtgacccatgcagatttcaagaaggcaaaggagaaggtgatgtacaagaagaaggaaggtgttccggatggtctctacatgtagccaatctattcatcatgccgaacaagttacccgattgtgtgtgtactagcacatctcttcatcatgggagatatgttaccacaatacttgttgcatactgtgctaagtggtcaggagaaccttgtattaattaattatcctttcattgtctcaaagtaaaaatttcccttgcgctaaaaatatgcatccgttcagcatcaaaaaaaaaaaaaaaaaaaaaaaaactcgagacctcgtgc

SEQ ID NO: 5317 - DNA, 1143 bp, Zea mays
  misc_feature (1141)..(1141): n is a, c, g, or t
cattgggtacctcgaggccggccgggagtcgtcggaaccccaaccgagttccccagtactccgcagtccgcacggccgcatccgtcaagatccgcgaagagcaacgaggcgaggcgaggggagggaaaacaagtgagtgagagagagagagagaggagggaaaatgctgcgccacgccgcccgccgcctcgtttcccgcgccgtcgctccgcccaccgcgcgccgggcgctcgccacggcggaggtgcccgcggaggccgtcgaggactccacgttcgtcgaggcctggaaaaaggtcgcccccaacatcgagcccccagcgacgcccctctccctcatgcagccgcgcccgcccacgccagctaccatccctaccaagctcaccgtcaacttcgtcctcccctacaagtccgagatcgccaacaaggaggttgacatggtaattgtaccagctacaactggtcagatgggtgttttgccaggccatgttgccacaattgcagagctcaagcctggtgttctctcagtacatgaaggaaacgatgtgagcaagtactttgtgagcagtgggtttgctttcgtccatgcaaactccattgctgatattgtggctgttgaggctatccctgtggatcagatcgacccagcattggttcagaagggtctcgctgaattcactgccaagcttggttcggcctctactgacctggagaaggctgaggcccagatcggagtcgatgttcacagtgccctcaatgctgcattgaccggttaattggtggcattttaaattgtcttgtctttttcatctacagttttagagtgagtttaagtttgcaaactcatgggcatgggatggagggaatgatcctaaataaattatactccatctaaaacatggacatatgtttcttgtttcctgaatcctgcatggatttctttttgtactggtgaacattttaactctgagctcaagacctggagctgctttctgcccccgttgagtttgggccatggatcagatgaaattgatgttcgtccgtaggttatgttaattgttaaatgttattatgtctatttttaagagaaatataaagtactgctcgggttactgcatcgtactttgggttgttaccactgntt

SEQ ID NO: 5318 - DNA, 942 bp, Zea mays
  misc_feature (930)..(936): n is a, c, g, or t
cggtccctgactgcgagcacatggaagaccgcctcgacctcccatggccgctgggcacccccgggccggccgggcttcccctccctgcctcctcgtctcctcggtctcccctccctgtcttccagagacacagagcagggcgctcttcggtcggaggagaagcgcgaccacgaccatgggctttatctcgttcgtcggccgggttctcttcgcctccctcttcctcctctcggcctaccaagagttcattgaatttggaaatgacggtggacctgcagcgaagaccttgaagccaaagttcaatttgttcgtcaagctagtgtccaagaatactggactggggctgccgcatatggatataaaaactgtcattgcagctaccatgtttcttaaaggctttggtggtcttctgttcatagtcagcagctcatttggagcattcctcctgctcatttacttggcgtttataacccctattgtgtatgacttctacaaccatgaaatggagtcaacactgtttgtcgatctttttttcaagttcatacagaacttggcgtttatgggtgccctgcttttcttccttgggatgaagaactcaattccaaaacgtcgctccaagggaaggacaacaaaaaccaagacaaactgatgtcagtggttgtaggaggggaagcaattgggctcattatgtttgcatactatacaggaatagatgtcccacttttgttcttggtgcgccaattgaattgtgaattgggacttacagaacttagcatgtaggatatttaagttatcttccgcaattttattttcttatgttgcgatgtgttcttatgtcacattccattttgctacaagaactgctttgacagtaaaaaaatatattaagtcgcatagtctaaaaaaaaaaaaaaaaaaaaaaacctaaannnnnnnaaaaaa

SEQ ID NO: 5319 - DNA, 4927 bp, Zea mays
gtgaaacgggagggcaagaggctaaacagagatcttttacgaattgcacctgtttatataggaggctcctctgaaaatgaaaagtcatatcgtggttgggaatctgttgctgggctaagtgatgttattcagagcatgaaggaggtggtgatgttacctcttctctaccctgagttctttagttctctaggtcttactcctccaagaggtgttctgctgcatggccaccctggtactggtaagacacttgttgtaagggcactcataggggcatgttctcaaggtaacagaagaattgcttattttgctcgaaaaggtgctgattgtttgggtaagtatgttggtgatgctgagagacagttaagacttcttttccaggtagctgaacgatgccagccttctatcatattttttgatgagatagatggtttagcaccttgtagatccagacaacaagaccaaacacataattcagttgtggcaaccttgctctcgttgcttgatggtttgaaatcacgaggctcagtcgtagtgattggggctacaaatcgtcctgatgctattgatcctgcccttaggagaccaggaaggtttgatcgtgagatatactttccactaccaaccttcgaggatagatctgctattctgtcactgcatacaaaaaaatggccaagtcctatttcaggtgcattcctgtcatttgttgctagccaaactgttggatatgctggtgctgatctgcaggcaatttgcacacaagcggcaataaatgctttgaaaaggacatgcccattacatcaaattttacaatatgccgagaaaggagttcctcatgggcgagttcctctaccaacagttcttgtcgaggataaagattggctagctgctcttgcagctgctccgccaccttgttcaaaaagggaagcagggattgcttcaaatgatttggtttccactcctctagattcctgttttgtaccaagcctttttaaaccattggtacaccttcttatttctatgtatttggatgagcgtgtatggttacctccatcccttcttaaggcatgttgctctataaaggaagtggtattctcatccatggaaaagaatactgtaccccacactttatggccaacttatcttagttctttgatccaacaaaaagatattgcagatagaattggaacaatcttgtcaagctgtggccttatatctgcacaactaggaaatcgtggttcaatgttgctgagtgatgttaaaacacaggagaatttttgtggcagcagattaaatcccactggtttgcatatgaaaggagggctgccacataagttatcaggctttcgagttttagttgctggagcaccaagatcaggccaacaacacctaattcgttgtgttcttcatggttttatgggccagattgtaatacacaagcttgaccttgcaactatggtgcaggaaggaaatggtgatatccttagtggtctgacacacattctcttgaaatgtctaaaccttggaagatgcatcatctacatgcctagaattgatctgtgggcagttgataaggcccataatcaaatagaagataatatgctcaatactgggtcaggtcgtttagcatcctccaccgctgatcacaaaaaatgttcagaagtttggaatgcattgattgagcaaatggattcattgttagcttctgtatcaataagtgttctgtccaccagtgacatgaggtttcaagatcttcccagtggagtaagaggtttcttcagcacacatgttgtggatcagtgccttgtttcttcagaacatacaatacctagattttctgtgaatattgacaaccactctaattgggatgagatggttgattcatgtgctttgcagttatcacatgacttgattcgacatcatgttcaatttttgcatgatgaatctcataagaatgataatcatcaacaaaaagaagtgtttgcttccatgaatattagtgcagaaggtgaacttaagtccagtgagaatgagcgacccttgtgtggagttgcttctaaggagaatccaattcagctggctgcaggcagagctcagcaagagcctccaccatccaatgtggaagataaagtagaaaatgatcaatttttttttgaaggcatagttcaaagaaatccttctagtagacttgtaaaaggcagcgagtcatttgctattgttgcttttggaattcagatactgcagcatcctcagttctcaaaactttgttgggctacgtcaaagctacgggaaggcccctgcactgatataaatggaccatggaaaggctggccatttaattcctgtttgttgcagagcagcaccttacctggtaaatcactaaatggaggggacaatgttgtaaagggaaaggaaaagtctgtctgtgtgagagggctggttgctgttggcttattagcttatagaggtgtctatgggtctgttattgaagtttgtgctgaggtgagaaaggtgttgggactgttagtcggacagattcaaactaaaattttggaaaagagaaatcaattccggtattttcgaatcctatctcaagtagcttatctagatgatattgtgaacagttgggcatacacctaccaaagaacacatgttgatacccggacaggaacatcccgcatgaagagttcaagtgccaaagaatgtcaaaggaccaagtatgctgcaggaaccaatgtacaagttgctcctgttgccatccctgctgaggttcaagacattccagcccaacacactcaggatcatgaagttgttcctggtcctactgaggtgcaaggcaatccggttaagcatactgcagaacaacctggaagctattcgatggactgtgaccttgataatcatgtgaactctgtttccagcaaggatgcagtagaacacgatcatgtccattcagctttacctgatgtgcataggggcaatacacatgcagatacagtaacaaatgacggagaacctattggagcaaacaacaatgggaaagtgtccaggttaacctacggtgaagataaattcagaccaggtattcaaagatctgaaaaccacacagaatctatggaaggtttaggctgtttgcaaagggcaggagattccgttggatccccagcaagtattaacaatacagaattaccaaagaacaatgtttcttctgaagctcatattgatgataatgagttgaggagaaatgatcttgtgaatgatgttgaatcaaattcgatcgatggtaaacatgacaccatgatgaatctttcagttccaaaaatttcatgtctctacaaatgttgttctccatgtttccaatctatttataagatggttcatggtattatttcaaatactctaaggcctaatctgcattgcttaacagctgatgatatgcatgacattctgtcatcatggtgcttgaatctattagggtctgttagaaagttgtacagctcacatgatgaggccagctgcacagaagattttgttagaatgtccaataaagaaacccacttagagcattgtgcttgtcagagtgatatctatctttcaagagaatgtgtatgccacttggaaagcaatggggatgttgaaactgcaaatactgattgtcatcctctatcaggacaaagcttaagttttttctttaaagatggtgtatggatgccgttggatctcaccgcggaaacaaaacttcattgcagcttcaggagattctgtgtttgctcgatattaggaacagtttctatgctcagctagatcctcagttcatgatattgtctgatgcagttgcaaaagtacatatagtactctaatgctctaagtgtggctccagttgtgcacataacacaacatcatcaggatgtctttggttgattggaacttctcatccttgatgcaacttttgggcaagcttttattgcacataaattgcctctacctgttatggtcattagtggaaaactggctgttgtagttgcttcgtagactgaatatttaaaaagaagctaagatattagtcttcattttttttccaacgaagttacccatgtaggttggactgttgttgctgctggaaatttcacggttagatgatgactgagtgactgacgccatttcagttctcattgtaatatgtattatggcccaattaagcatcaagttgaaacatgattgaatcttatactcacattttgtgttgtaaaactattctggtcagtggtatgctttctaatggacaactgacattcagcatgataaatctttataggttatataagaacacactgtttagatgaggttggaattatatttttgtacttgcttataggagtgtgaactgtgaacaagtttttagtagaggccattggcaatagaaataaatttctaattgctgttggttgttgttattgtattgtgacttggcatgacctttagagttttacctctaagatttatctctttttttttggaaaagtatacagataaggcagtgaactaagctgaaatttatttagatgtttaaaggtttagcatattattgaataattcatatattatttgttctactacattatctacacacataattatctctacatttgcaacgtaaatcgcagtagtgtttgctaatgctacgtttgaggacattttttttatatttttgagggatacacaataaagtctaaagtgatttagaaaatgccgcgctaggggcggtcaatctctacttagcttctcggtttcaatttataattcatttaaccttaagtttgatcgacccgtcttattaaatttttttcataattattgttaatttttattgtgatgttgtttagcatataatatacttaaactttgttttttttcttgtttttttttcaaa

SEQ ID NO: 5320 - DNA, 925 bp, Zea mays
gtgccaagccctcgcggtcgacttcacttccccacccccacctcttctttccccctctccctcccctcgccgtcgctgtcgtcgccgtccgtgctagccatggatctaggcgctcccgcccgacggcgcctaccgatccgcctcttgctggtgtcgctcaccgtcctcgtggtcctcaccgcgcgctccagtgccgaagtcatcaccctcaccgaagagaccttctccgacaagataaaggagaaggacacggtgtggtttgtgcaattctgcgtcccctggtgtaaacactgcaagaaccttggaacactatgggaggacctgggaaaggttatggaaggtgcggatgaaattgagattgggcaagttgactgtggtgtcagcaaaccagtatgctcaaaggtcgatatacactcctacccaacattcaaggtgttttatgaaggcgaagaagtagtaaaatataaaggacctagggatgtggaatcgctgaagaacttcgtgttgaatgaagctgagaaagcaggcgaggcaaagcttgaagctgattgaggcaggggagtttcagcaagcatgtggcgagtggcgtagacaaggaacaatgctttgcaacattgtcttctatcctgtcatttacaaagccagtttacaggaaagaaatgaccttatgagctcgtatcagagtattcctcttccaaagtaactccgaatcagttcatagaagctgtactccattccatagtttttatcacattgacaaactctccgaatcagttaatagaagctgtactccattccacacattgacaaactgaagtaacgattggaacgcaaccacaaaaaaaaaaaggcacctcgcccgcccggttgcgcgtcttgcaacgataaaaaaaaaaaaaaaaaaaaaaaaaaaaaaaaaaaaaaa

SEQ ID NO: 5321 - DNA, 2446 bp, Zea mays
ccgaaatttaaagcccggtctaagcccgtctacgggccgtggtagtccgatccatattatttcgtgccggtccatgttttgggctcctgttttttgagccgtgctcgtagtggctaaaaaaacccgttccatattctcagcaatagtcgtcagtcaaccccagccactcatgttcatgagcacgcaaactgacatcgcttccatttattattatccacgtggagccttctcattggtggtgtctcgatctgttccaaccatatcaccattgtccgatcagcatgtacataatagccacaaactctggaaaatatctttatatacgataataatgatacatagcataataatagaatccacacatatatatgcatggtgtttggtagttcctcgctgtcgtcgaaaatgtacatactgctgttgacgagccgcatgtgaacggaaatggcattggtcacttaggatatttgaccataagcggacgactaatctcaaccatttataattattggaggcaaaaatgatgatgtggtgcacgaggttaggctattattgtataggactatgtcataccgatcgatggacggagaagcggaggacctcttttttaatgcaagactatactacaataacgacacacaatgatatttgatacctataaaataataaatttaatgtgaaattataataacaaatattacattttatcttagccaatatgtcgagaaagatatgagttgaaaaagaacttcacccttttttatagctcagtcagtcgctcgtccttcttcagttagtgaggcagtactatgtgaaagcactgcgttgtatgtggctttctgtcgtagtgctttcttatgaccaatctatgatgatgtaacggctcattcttgatgtaatgaccattggtaggcgagaagcggtgaaaatgaatagatctacgtgtgaagtcgcacgtacgtgacgcgggaaactgatcctttgaaggaacagagaagtcatgaaaaaattactcgtatgaagcatctcataaagatagtttgagatcatttcaatgggcatcttcttgcttgtcgtacttcacaaagatgctctcgtcaagctctttgtcacatgcacacactcaaagataggagttgtataagacattgttctgctgagccatcgtatatacggagaggaaaaccggatggtttagtacgtcggatgtgtgatgcggatgccatcgtcaccgctgcaacgccagcaaaatgacgcggcccgcccggcgaaatcattgttcaattgttgcagtcattcgtgtttatatatgccctcccgtctgacacgcagtcagtatctgtactaactattaagggggcagtgtagactgcccccgtctacgaatcccatccgccgctccgtctcctccgctgcgaaaccagccgtcacccgcacgccctcacgctccgcgaatcccccgccgcgcctcaagctccgcgtagcccacccatcgcaatcatgttcgccttttttccgccgccaaacccgtccctcccccagcatcgcagcttctctcgcctcctaagacgcatccctcgccccccatcacagctgcgggctcgcgcaagcatcgtccctcccctccacagcatcgcagtcgtgggcgtcctcccgcttctctcgcccggccctgtccccgccgtgctggcacccgcccgaggcacccgcaggaacgccatccatctaggttcaagagggccgccgccccattatcgtcctcatcactgacgcccagaacccccaggtccgcaagcagtacaccatccaggtcggcgagaacgagctcgtcctcaaggagctggagctgctcagcgatggggccaacgtgtacaagctcatcggaccggtgctggtcaagcaggacctcgcggaggccaaggccaacgtcaagaagcgcatcgagtacatctccgcagagctgaagcggatggatcgggcgctcaaagacttggaggaaaagcaaaacagcaagaaggaatccatattcaagttgcagcagaggatgcaggctgtacaagctaaggcttagacaactgtttgttggttgcaactagtccaaggccatgcttcatttcatcccaatgccctccagggtttttttttggtggggaggaatcaggtgtctgatgttctcgtctccacaacgaaaatgaaagaaaaacggttcctagtgaaatactaggctattctgtatgccctagtataaaagtgtgcctctagtagaactgtagaagatgtagttatcagtatctcttttgtattattggcccacgtttacttctcaatcgaatatttatgcgagggatgtttgtcaacgccttaggcttcatcttgaatttatgactttcattgcttgagtgggcccatgccaaaaaaaaaaaaaaaaactcgagggggggcccgg

SEQ ID NO: 5322 - DNA, 1870 bp, Zea mays
ccacgcgtccgaactacctaccaccactccggaagtcctgctagctccttgggggcctcgacgccggccgggctccttcctttcagtcagccagccagccatggagacggcctccttcctttcagtggcgctggccctggcggccctcgtccccgtctcgctgctccttgtgaaccggctcctctacggcaagctgcccccggggccgcggcggcggcccgtggtgggcaacctgttcgacgtgcagcccgtgcggtgccggtgctaccaggagtgggcgcgccggtacgggcccatcatgacggtgtggctgggcacgtcgcccacggtggtggtatccacgtcggagctggccaaggaggtgctcaagacccacgaccagcagctcgccgaccgctgccgggaccgctccaccgagagcttcagccgcggcggccaggacctcatctgggccgactacggcccccactacatcaaggtgcgcaagctctgcaacctcgagctcttcacgcagcgccgcctcgaggcgctcaggcccatccgcgaggacgaggtcaccgccatggtcgagtccgtctacaaggccgtcaccgcgcctggcagtgcagggaagccgttggtggtaaagaaccacctctcgatggtggccttcaacaacatcacgcggctggccttcgggaagcggttcgtggacgcggccggcgagctggacgagcaagggcgcgagttcaaggggatcgtccacaacggcatcaagatcggtgcgtccctctccatcgcgcagcacataccgtggctgcgctggctggccccggtcgacgagcaggccttcaaagcccacggcgaacggcgcgaccgcctcaccgtgaagatcatggaggagcacgccagggccctcaagcagcgcggcgcccagcagcacttcgtcgacgcgctcttcactctcagggacaagtacgacctcagcgatgacaccgtcataggcctcctctgggacatgatcaccgccggcacggacacgacggtgatctcggtggagtgggcgatggcggagctgctgaggaaccccagagtgcaggagaagctgcaggaggagctggaccgtgtcgtcggccgcgaccgggtcctgtcggagacggacttcccgaacctgccttacctgcaggccgtcgtcaaggagtccctgcgcctgcacccgccgacgccgctgatgctcccccacagggccagcgccagcgtcaagatcgccggctacgacatccccaagggcgccaacgtcgtcgtcaacgtgtgggcggtggcgcgcgaccccgaggtgtgggacagcccgctcgagttccggccggagcggttcctccgggagaacatcgacatcaagggcgccgacttccgcgtgctgccgttcggcgccggccgccgggtgtgccccggcgcgcagctcgggatcaacctcgtggcgtccatgatcggccacatgctgcaccacttcacgtggacgctgccgagcgggacctgtcccgaggacgtgagcatgatggagtcccccgggctcgtcaccttcatggccacgccgctgcaggccgtcgccacgccgcgcctggacaaggaggaactgtacaggcgtgtcccttcggacgtgtgagccgtcggcgtcctggcatctgctgcgttccctgttttgaaacctgctgctgctgttgcgaatttgtgtaccattaactattcgctggtgatgtacgtgtcatagtcgtgtacgagcattttgtgtactgcagaacttgatcgctgagcatacacttttgcccggtagtaatttacaatttcagcattgcaaattactaaaaaaaaaaaaacaaaaaaaaaaaaaaaa

SEQ ID NO: 5323 - DNA, 3177 bp, Zea mays
cattgggtacctcgaggcgcacggggccattgggtaccctggggcccgccgggcccgactccctcggctgcctcccgcagccgcccgctgctccggtccttccgaacgctggcctgttcttccctgcctttggcccattcgtcaggcggcccctccgcaggcgacgcaggcgcgggcacgacggcgcgtggccccgactacgtagacagctaaccggtctccgcctccggcccttctcctgtcgcccgattgagtcgctgctgcaactgccaacttcacccccggcgagctcaccacagtcttccggaaaggtgctatcaatttggaagatggcagatgaggagcaggccccaagctctaggaaaagggttgcaggtactcaaatcaacaaggataatccggaacctgatgatgaaggaacagaacaagagatgggtacatttaagaaagctactgaagaagttatggcaacacggaggattgtaaaggttcggcgccagcagacgtcatcagcttcttctaaccctttctctgcaatcagatttgcccccactgattctagtgctcaaacaagtgctcctgtcccagaggtccaaccttcagatgtcaaagttgacgagggaagcaatggtagcgggaaagatactttgtctctgcccgacaagactgctggctctggggtaaatacggactctagtgcctcaactgaagcaccacctcagcctgttgaaaccagtgacaaggcagaagacacaaaggacgaatctagtggagacaaagtggtagttggagaacccaatgaaggcagttgcatgccatctgaagttgagggcaaaacaaaagagggagatgctgaagaaaaggaaaggacagatgaagctggaaatatcgataaaattagcaaggatgacactgggaagaaagatggagatgacactgagaagaaagatggaggtgatgatactggaggtgaatcagagcagaaagggcaaacaccatcagcaacaccccttttctcgtttaagaatctgtcaagtggtcaaaatgctttcacaggtctgaccggaactggattttcaagcacatcattctcgtttggctcagcctctaaagatggctcaagtgctggtcccctatttgggctgaaagctgatggttcttcgttcccttcttttaatcttggtgctgccaccaatgggggttctgccacagctcttgctacttcagcagaggcacccaagatgtttgctatgacagagggccctgtcgaaaccggtgaagaaaatgagaaggctgtattcagcgctgattctgctttgtacgagtacttagatgggggctggaaagaaagaggaaaaggtgaactgaagctgaacgtccccgtatctgggggcgagcgagcccggctcgtcatgaggacaaaaggcaactaccggctggtcctgaatgcaagcctctacaacgacatgtcgctcaaggacatggacaagaagggcgtgacatttgcctgtatgaacagcattggggagtcgccgagcagcctcgctacatttgctctgaagttcaaggacacggccaccagggaggaattcaaggatgcggtggagtctcacaagacaagcaaggcacaggaactgccgctgaagacgcccgagaactctccgaaggcagcagaagtctgaagccgcacccgagtcacgcttgctcgtgtcttttgtacgtgtccaggaaggaaggaactgagagagtttctgttgttgcggagtttttaagaatgtcgcgtcatgacatatgatgtcctgagttgtattttgcgtacgggttccctagtgctgtttttgggaacttaccattactacaggcgcataatcttgggatcctggacaagggactcgttttatctatttgctcgtcttgtgctccgttatgttctatcggttaagctgcgcgtgacgctattatgtcatgaataaatgtatgcaattatacatgttcctgttgttatattccacaacatggaatgcttttttttttcaaaaaaaagccgacgcggccgcgcttgccctttgctggataagggcctgttttaaaagctgatcgagaaagccagaaaggccagcttggaaccagattgtaaaacataatcagaacgaactaattattagcaaccggggatcaataaagcgcagtaaatccaaatttgaggagtgaacttgttagagcaaccggttccaattcagcgcactaatctaaatttgaggactcatgccaaaaacacatgtcaaacccatggaatccggaggccctcagatctcctcttcggcctttgcacgggtgtcgtgttagactttttccagcagtttatccctacctaaaataggtaaagattgttattgtagacgcttcccacagtttacctatagtttacgtaaaatccacggcgtcgccatatgtactgttagtcacctttatcttaaacgcactgtgtcaactatcgatctgtttgttttcatcaccttcttcccttcccttgccaaatgtagtttatgttaaggaaacacgtgtgaagtaacaagagactctctctcacgaacaatgagtatatggacaacctttttttggcaaaaaaacaaccaaaacgtgagttttcgataatatagaaggctaacacctatggatttttgacagacaaacaatctccactaaaatccaaataatgtggtttatgtcaagtaaacatatgtgggttcactaatatgagtctcacactcaagatcaatgggtatatgaccaactttttgtctgaaaacaaccaaagcgtgaattttcgttaatataaaaaaactaacacatgtattttgaccgataaatcgaattcactaaaaaccaaataatatggtttatgtcaagacaacatgtgtgtggtaagtaataggagcctctcactcacgatcaatgagcaaatgaccagcatttttggccgaaaacgaccaaaacgtgagtttttgttaatatcgaaggataacacctattgatttttgacagacaaatgatatccaccaaaaacaaaataatgtgatttatgtcgaggaaacatgtctggggtaactaataagagactcccactcacgatcaatgggtatatgactagctttttttttacgcggaaacgacccc

SEQ ID NO: 5324 - DNA, 4441 bp, Zea mays
aattcgggtgctgtgttgtgctgtgctgcgtgctgtggagggggaggaggagatggggaagggggcaggggcagcggagccgtcgacggtggtgctggccgtcaacggcaagcgctacgaggcggccggcgtggctccgtccacgtcgctgctggagttcctccgcacccagacgcccgtcagaggccccaagctcggctgcggcgaaggtggctgcggtgcatgcgtggtcctcgtctccaagtacgacccggccacggacgaggtgaccgagttctctgccagctcctgcctgacgctgctccacagcgtggaccgctgctcagtgaccaccagcgagggaatcggcaacaccagggatggctaccaccccgtgcagcagcgcctctccggcttccacgcctcgcagtgcggcttctgcacacccggcatgtgcatgtccatcttctccgcccttgtcaaggccgacaacaagtccgatcgcccggaccctcctgctggcttctccaagatcactacctcggaggcagagaaggctgtctcgggcaacctttgtcgttgcaccggatacagacccattgttgacacctgcaaaagctttgcctctgatgttgacctcgaggacctaggcctcaactgtttctggaagaagggcgaagaacctgcagaagtcagcaggctgccggggtacaacagcggtgccgtctgcacctttccagagtttctcaaatccgaaatcaagtctactatgaagcaggtgaacgatgtccccattgcagcctcaggtgatggctggtaccatcctaagagcattgaagagcttcacaggttgtttgattccagctggtttgatgacagttctgtgaagattgttgcttcaaacactgggtctggagtgtacaaggatcaggacctctacgacaagtacattgacatcaaaggaatcccagagctttcagtcatcaataaaaacgacaaagcaattgagcttggatcagttgtgtccatctctaaagctattgaagtgctgtcagatggaaatttggtcttcagaaagattgctgatcacctcaacaaagtggcttcaccgtttgttcggaacactgcaaccataggaggaaacataatgatggcacaaaggttgccatttgaatcggatgttgcaaccgtgctcctagctgcgggttcgacagtcacagtccaggtggcttccaaaaggctgtgcttcactctggaggaattcttggaacaacctccatgtgattctaggaccctgctgctgagcatatttatcccagaatggggttcagactatgtcacctttgagactttccgagccgccccacgaccatttggaaatgctgtctcttatgtaaactctgctttcttggcaaggacatcaggcagccttctaattgaggatatatgcttggcatttggtgcctacggagtcgatcatgccatcagagctaagaaggttgaagatttcttgaagggaaaatcgctgagctcatttgtgatacttgaagcaattaaactactcaaagataccgtttcaccatcagaaggcactacacatcatgaatacagggtcagcttggctgtcagtttcttgttcagtttcttatcttcccttgccaacagttcgagtgcaccatcaaatattgatactcccaatgggtcatatactcatgaaactggtagcaatgtggactcacctgagaggcatattaaggttgacagcaatgatttgccaattcgttcaagacaagaaatggttttcagcgatgagtacaagcctgttggcaagccgatcaagaaagtcggggcagagatccaagcatcaggggaggctgtgtacgttgatgatatccctgctcccaaggattgcctctatggagcatttatctacagcacacatcctcatgctcatgtgagaagtatcaacttcaaatcatccttggcttcacagaaggtcatcacagttataaccgcaaaggatattccaagcggtggagaaaatattggaagcagcttcctgatgcaaggagaagcactatttgcagatccaatcgctgaatttgctggtcaaaatattggtgtcgtgattgctgaaacacaaagatatgctaatatggctgcaaagcaagctgttgttgagtatagcacagaaaatctgcagccaccaattctgacaatagaagatgccatccaaagaaacagctacatccaaattcccccatttttagctccaaagccagttggtgactacaacaaagggatggctgaagcagaccacaagattctatcagcagaggtaaaacttgaatcccagtactacttctacatggaaactcaagcagcactagcgattcctgatgaagataactgcataacaatctattcctcgacacaaatgcctgagctcacacaaaatttgatagcaaggtgtcttggcattccatttcacaatgtccgtgtcatcagcagaagagtaggaggaggctttggtggaaaggcaatgaaagcaacgcatactgcatgtgcatgtgcccttgctgccttcaagctgcggcgtccagttaggatgtacctcgatcgcaagacggacatgataatggctggagggagacatccaatgaaggcgaagtactctgttgggttcaagtcagatggcaagatcacagccttgcacctagatcttggaatcaatgctggaatatcaccagatgtgagtccattgatgccacgtgctatcataggagctctcaaaaagtacaactggggcactcttgaatttgacaccaaggtctgcaagacaaatgtctcatcaaagtcagcaatgcgagctcctggagatgtgcagggctctttcatcgctgaagccatcatcgagcatgttgcctcagcactcgcactagacactaacaccgtcaggaggaagaaccttcatgattttgaaagccttgaagttttctatggagaaagtgcaggtgaagcttctacatacagcctggtttccatgtttgacaagctggccttgtctccagaataccagcacagggctgcaatgattgagcagttcaatagcagcaacaaatggaagaaacgcggcatttcttgtgtgccagccacttatgaggttaatcttcgaccaactccaggcaaggtgtcaatcatgaatgatggttccatcgctgtcgaggttggaggaattgagataggtcaaggattgtggactaaagtgaagcagatgacggcctttggactgggacagctgtgtcctgatggtggcgaatgccttctggacaaggttcgggttatccaggcagacacattaagcctgatccaaggaggtatgactgctgggagcaccacttctgaaactagctgtgaagcagttcggcaatcgtgtgttgcacttgttgagaggctgaagcctatcaaggagagtctcgaagctaagtccaacacagtggaatggagtgccttgattgctcaggcaagcatggcgagtgtgaacctatcagcacaggcgtactggactcctgatccatctttcaagagctacttgaactacggagctggcaccagtgaggtggaagttgatatcctaacaggagcaaccacaattctgcgaagcgacctggtgtatgactgcgggcagagcctaaaccctgctgtagacttgggccagatcgagggctgctttgtccaaggaatagggttcttcacgaacgaggactacaagacgaattccgacggcttggtcatccacgacggcacatggacgtacaagatccccacggtggataatatcccgaaggagttcaatgttgagatgtttaacagcgcccctgacaagaagcgtgtcctatcttccaaagcgtcgggcgagccgccgctggttctcgcagcctcggtgcactgcgcgatgagggaggccatcagggcggcgaggaaggagttctcggtcagcaccagccccgcgaaatccgccgtcacattccagatggacgtgccggcgacgatgcccgtcgtcaaggagctctgcggcctcgacgtcgtggagaggtacctcgagaacgtgtctgccgccagtgccggcccaaacacagcgaaagcatagatccagcaggcctcagggtgcagtcggcgcactgccagagatgatgtgtgctgccctgatgtacagacagtacagtacagaggagagagaattgggggaactcaggaactgcgaggagcgatgaacagtatatagagtgaaaaataaaagtgcttcgtactaataatcactagaaaaaattatgcacatctcccacgcactaccggcacgactgttgaatattttgtaaaataagatgtcataagctatttattttctgtatgattagatcagcaaataatttaattcaagtataaaaaaaaaaaaaaaaaa

SEQ ID NO: 5325 - DNA, 1400 bp, Zea mays
cctcgaggccggccgggagacttgatcgccatcagtgtctactcttctaatgtttgaacgcagagcatcttccgcgaaccagtaaaaaaatgtggtttcatctcaattgtggacgagtttacatgcaacatttcgattcacataaagtctagcgtaccaggacgtcttgaatttcttccaaaatattccaaaatgggctatcagcatccgaaggcacgatgaatttgggagctggaactacagttcgtcaccctgttcattcattcagaaaagtgcggtggtttctcgtgaacgagcaacccagaaaaagtacacctgtcgcgtaagcgtcctcaggcagcagctccccggtcgcggtctctgtctctctgaagggaaagctctgtttccccttcccggtgccggagtcggggaaggtcaccgcgggcgcgagccgatggacagcaacaacctcctggcggcgtggccggtcctgggaccgggcgtcgccggcgccgtattcggcgcaggctggtggttttgggtcgacgccgtcgtctgcagcgccgccgccgtgccattcctccactacctcccagggttcttcgcctcgttcgccgcgctcatgttcaactgcgtcaaccgggaggacatcggcgatggctactactcaccgtacgacgactccgagtggagggtgaagctctggctttttatttcgtacgtggtgtcgtttgtttcgctggccggggcagtgggtttcttggttcaagatgcgcttacggatacggggccatctgcgtggactggcagtgctggcatcctgcagtgcgtgtttgtgttagtgagtgggctgatctactggacgtgccactctgaagattgacttaagaagtataggtatatatggccaaggaggaggaggatggagactgcttttctcagaagcgattgcttttccgtagtacgtttctggaggcacctttggaccgtgctttccgaaacgggtggaataaagagccattttctagttgtttcaagagagatgtagataagctgtactactattttacacgtgtttatagtcgtgtatcatgttgcttaaaactactttgtgaggtgttgttttggagcaagaaacttataggggtgctaagtactcgctctgtttctttttagctgtcgccggatagttcaattttgcactatacagcgacaactaaaatgaaatgaatggagtagtcaggaaacatcgttacatttttccctgttggcgaatttctcgtgcaaggtttgacaactctagtctgctcctgtacctcccgaggaagtttggtgttgccaacattttgtagacgcctagtcatgttgtgtctggttggttggaggcctgccaggcaacaacacatcttggcccaatc

SEQ ID NO: 5326 - DNA, 1793 bp, Zea mays
cattggggacctccctggagatagcatcacacactgacacacctcgcccccaccgcgacagtgattcggagcgcgaggcccgttcgcaggtcacttctcaattctcaaccttttcttctgccggcgtgcgctctctctctcctcctcgtgcggcagctgggtgaggtttccaggtcttggtcttgtcattcgccagcgacgagactcaccaggtttgcattgatcagtatggtgactgaaaatgcagatgaagaacgtgacactggtccagaaaataagttaagacacaattttcgattgggagatataacatgggttaagtacaatggctcttcatggtggccatcccaggtcattgatgaatcatgtgttggtagcaagcctaagaagaaagacaagtatgattgcctagttcggctctatggaacatgtcaatatttatatgtagacccttggaagtctaactcagaatttgaaatgatgctgaagcaagaaaacaagagcgcaatggaagcattccgtgaggtgcttgagaaggagctctctggcgttaacttgcgcagtgattatgaggatggttatgaagaggaagatgtcaactcaaaaggcggtgacaacaaagggacctcaaagaagacctcttctagaaaagccagaaaacaagaaggtctgaagcaacaatataatggagaggaagaccaaaatggtgggagcaatgcaactactggaggtgctcggaaaaaaaagggtgggcatgtaagacaatcaagtgctactcatgatgccattgataaaaattatagtggcagttcagctgaaggtttaaggaacaagagacagaagtctgctgctcaaagcgcttcggtaggcagaagggaagggttgaggcaacgatctgatgccaagcaacatccagatgcagccgagggcagtacagaaccactcgctgatgtacctggaagcgatggtgcagctcaaggttcaatgcaacatggaacttcggctcctcataccgaaataaaagcgatggtcaggaacatactgttcaaggacatcgttgacaaggagcacgatgctgagatggcttatgtggatgaagtgatcaatggcatctgtaacgctactgacagcatggtcggcggcggcggcggcggtgatgcttccgcgaaaggcggacgaggctccaagcagagcggcagcggagtggagggtgagtcgagcaatgccacagaaaggcgaagagatgaagcaactgagaatgccctcgccgtgaaagggaatacccctgggaacaacggcgatgacgccggggcagcttagcgcacgccaaaataggcagaacaggatcatgcaaaccctagctctgatccctccatcaggatctccgtttggcaggaatgaagaggttgcagccagccgtcaaaaactctaattcacttatgagcgccctaagaaacagtccgtgagcccccctagcgttttgcagtcctgtcctcttgcgcaccatgcctagtatcgctgctgccattcagcttgcttttgggagacgcctatatattgcgcctgatctgctgaattacctagcagttgctattaatctatccagaagacttggattgagtttgattgctatgtaaccacgcggttggttctgtacttgtacgcaactgtgcgacattggccaatgtggtgccgttgaacctttatgtattattgtgcacccccatcaccatgttattactagcccccttcggcatttcagaaaaaaaaaaaaaaaaaaaaaaatcgagagt

SEQ ID NO: 5327 - DNA, 1624 bp, Zea mays
cattgggtacctcgagggccggccgggattctattctgttcgggcacctcgaggccgattcctactccgagtcgccacctgcatttgtctatcggtcaggagcatggaggggagacggctttcacgccagcagttgcgctcgctaccggacgccgcgtccttctcgccggaagtcgcggccagcccggggctcgtcggctccggccagttgggtctcggtctctcggcggcgttcgagactctgccgccgattttggtagaagtgaatggctttacaaggacactgattttgaataggccaaagcagttaaatgcactctcctcgaccatgattatgggactcttgaggtgtttcactgcttatgagaaagacgatggagttaaattgttgattatgaagggtaaaggaagagcattttgtgctggaggtgatgttgctgcagttgttcgatctatacataaagacagctggaaatatggtgctgatttcttccgaaatgaatttttgttgaattacataattgcaacttataccaaacctcaggtttctcttcttagtggaatcgtcatgggtggaggtgctggcgtttctttacatggaaggtttagagttgccaccgataacacggtttttgcaatgccagaaacagctctgggtctctttccagatataggggcctcatattttctgtctcggcttcctggattctatggagagtatgttggtcttgctggtgccagattggatggtggggaaatgcttgcatgtggtctggcaactcattttgtccagtcaaatagtctgctatcgctggaagaatcacttaaaaaggtggatacttccaatgcttttgcagtgtgtggtatcatcgatcaatttgctcaacaaccatcactgaaagaaagcagctctttgaataggttggaaatcatcaacaaatgcttttccaaaaggacagtcgaagaaattatatccgctcttgaagtagaggcctcaaattcggcagatgaatgggttgctacaacaatccagtccttgaagaaggcttctcctaccagtctgaaaatctctctgagatcgataagagaagggaggacacaaactgttggggagtgcttgcagcgggaatatagaatggtctgccatgtcatgcgtggtgacttcagcagagacttctttgagggatgcagggctatattgctagataaagatcgaaacccaaagtggatgcctccaaggttggaacaagtgcatgatgaggctgttgaacagtatttctccagaattgatgatccacagtgggaagacttgaacctacctgctagacgctcccacggaagaaatatcgagtccaagctttgatcgaaggtcatgggagaaaggtggaactctggaacggagcctcggtagtggtcagaataacacattattgcacatcatctcaagtttgaagagtctgcagactattgataaaataaaaacatgaatgtgccatataggtcaacttatatcacagaaagaaactctttgctgtttatacgtggagactggagtcatatgcatttttaaataattataagtaataaaatcgaaaaagaaatcgttggaaaaaaaaaaaaaaaa

SEQ ID NO: 5328 - DNA, 1996 bp, Zea mays
gataaaccagcaatcgcatattcgcttgcctttcttgccctacgccgccagcttcccacggagccaccaccctccacttctcaccactgccgtctccttcccaaacccggctgccgtctcctttgattccacggcctgccacgcagcagcagcaaaactcctagtcaaccccgcgacccgccccctgctcatcctagcccaaaactttttttcttcgatctccgcaatctacagctttgcttctcccggctcgagcggctagggtttcgggagtgcgcggtgagacggcatgacaacgcggggagctaagcgcgcggccacctccgaccccgccgcacccgatttaccaagtaagagagtaatggacggaccctcttttgatgttcacagggcggagtcttcccatcagcatgtgatggcaggacccgctagtttagatcctcggcgggcggaggctgctagcaaacatgtgagggcacttaatacccagtttgcaagctgggttcaattgcagctgcaaaatcatccagctgaactttgggaggacggccttaaggattacatatcacatgcttctgaaatcatggaaaaattcaaggatgttgtcaactggctaaggcaaaatcaagcaggttcaatagttgtttcatccccaagctcactgaaggatgataagtccaatctgccagcagcagatgatagcaagctcttagtacagccaagttcagataacaaacagaaggctccaattatggcttctagttcttcatcttttcagaactcaagcttaccgaaccttttttcatcgccttctcagcaaaaaacaccagattacagtggtatgtttgctgacaagaagaacacgtccagtgatagcagtaaaccagctttccagtttggtggaaataatgtcatatttggtggcaagaaggatgcacctgttgacagcagtaaacctttccagtttggtccgaataatggcatatttggtgacaagaaggatactcccagtgacagcagcaaacctttccattttggtgcaaacaagggcatatttggcgacaagaagacgacaagtggtgacagcagtaatccttttcagtttggtgcaaataatggttttccaacatccaatgcaccatctattttttcttcagttgcccaaagttttaacccacagagtccacctctgttttcaatgaatcaacaatcagtcctcccaggaaaccaaaatacttctgaagcttcagctgacgcagatgaagatgctgaacctgagaagccaagcagcccttctgtaaagaaggcagaagagaagggggtagttgttgttcatgaaaccaaatgcaaggtgtatgtcaagcatgatgatgccactaagggttggaaagacattggtgttggtcagctctctatcagaagtaaagaaggcacagagaaagcttccaaagaatccactcctaccattgttataagaaacgatgttggtaaaatcctcctgaatgctctgatctacaaggggataaaaatgaaccttcagaagaatacggttgcttcgatatttcatacttcagatgcacaatcaagtgaatcagctggtgacacagttgtagctcgaacatacctgttccgattgaaaaatgtagaggaggctacaaaactatcgacagcaatcaaggagaatgcgccctcagactagttcttacggcatggattatcatctcgaatctctgcttttggcacgagctgtaagatctgaaggggacaccaccgatggccactgcggcaggctaaaagatgccttgcagagtttctttatttctttttttgttctcctagctgcatcaagatatcttgcttgtaacttgtaaggctgactggctggttatgtattagtactttcatgtaccatcttttgcattgacaagattattgagcatgcttgcagcccaaaaaaaaaaaaaaggcagcaaagcaagtggcaatggttcaagtc

SEQ ID NO: 5329 - DNA, 2102 bp, Zea mays
cgattgggtacctcgaggccggccgggactacgggcgacgcgggaccctcgagcccggccggctctcccacgcactccgcaattccgcatcacgcagaggcagagcgaccaacccagaaccccaccccaccgcccgcaaccgcaagctcagattccctccccaccccaccccaccccaccgtcccgctcactccagcccagcccgcgtccccacagcccagcgacagcgggcaccggcggcatccagccatgtgcggcggcgccatcctgtcggacatcatcccgccgccgccaccgcggcgggtcacggctggccacctctggcccgagagcaagaagccgaggagggctgcatccggcaggaggggagcccccgtggagcagcatgagcaggaggaggatttcgaggccgacttcgaggagttcgaggtggagtccggcgagtcggagctcgagtccgaggacgagcccaagcccttcgccgcccccaggagcgcgctcgccagaggtggactaaacactggtgcagctggtgtcgatggccctgctgcaaattcagttaaaaggaagaggaagaaccagttcaggggtatccgccggcgcccgtggggcaaatgggctgctgagatcagagatcctcgcaagggcgtgcgcgtctggctcggtactttcaactcccccgaagaagctgccagagcttacgacgccgaggcacgcaggatccgcggcaagaaggctaaagtcaacttcccggatgaggttcctacggcggtttctcagaagcgccgtgctgctgggcctgcctctctgaaagcgcctaagatggacgttgaggaggagaagccgatcatcaagctcgcagtgaacaatatgaccaactcaaacgcatatcactaccctgccgtcgtcggccacaacatcatacccgagccattcatgcagactcagaacatgccattcgctcctctggtgaattatgctgccctagtgaacctgtcttcagaccaaggcagcaactcgttcggttgctcggacttcagcctcgagaacgactccaggacccctgacataacttcggtgcctgcgcccgttgccaccttggccgccgttggcgagtctgtgttcgtccagaacaccgccggccatgctgtggcgtctcctgcgacggggaacactggtgttgatctcgccgagttggagccgtatatgaatttcctgatggacggtggttcagacgactcgatcagcactctcttgagctgtgatggatcccaggacgtggtcagcaacatggacctttggagcttcgaggacatgcccatgtctgctggtttctactgaggctgaggcccagcgactggtgcttgtgtacatagggggggacaaagggtaagagcctgcagtaacagagattggctctttctggtacttgcaatttctatcccttcaactctttcttccgcccccgtgtttcaggaataatgttctggagatgaagaaacgcttgcgtgggcgtgcctgcaggcacgcgtgtagtagctgcggtattagtatatatgcttagatgttcagtcacttcctttaagtacaatttggcgctggacatgtaccttattttactatgtatccgtgacaacagctatgtgtctgctccttttattttcttgtctttgcttcaaaaaaatggctctgaacattgcgagtttgtactttgtagacaatatatatatatatatatgtgtgtatgtgcttggtttgcgcgctccatcctcagcggcgcgctgtacatcgtcagtgccggcgccagcgacttcgtgcagaactactacataaacccgctgctgttcaagacgcagacggccgaccagttctccgaccgcctcgtggccatcttcggccgcaccgtgcaggagctctacggcatgggggcgcgccgcgtcggcgtcacgtcgctgccgccgctgggctgcctgccggcgtccatcacgctgttcgggcacggcgccgccgggtgcgtgtccaggctcaacagcgacgcgcagagcttcaaccggaagatgaacggcaccgtggacgcgctggcgcggcggtacccggacctc

SEQ ID NO: 5330 - DNA, 1969 bp, Zea mays
cattgggaccctcgaggccggccgtcgcgtcgcgtccctccttcctccctctccatttccaccaccaccccccgccccctctctctctctcttcttcttcttcttcaatcctccctccccgcgctggagttggaggagggagaggggacaagctttccggcgccgacgccgacgcggaccccgcgccgacacgatccggtggatcaagtgcatcacacctttagggaggccccttggacagcagtttgtgctgcaaattctatatagctctgtcgcagcatggcctcggtgggcgtggcacgctcttctttgggatttcagaatggcacaagttctagcagtgacccagatcgtcttcccaacgagttgggcagtatgagcataagggacgacaaggacgttgaagatattgtagtcaatggcaatggggcggagcctggtcatatcatagtgaccagcattgatgggagaaatgggcaggcaaagcagaccattagttacatggctgagcgggtggtaggtcatgggtccttcggaaccgttttccaggccaagtgtcttgaaactggtgagaccgtagctataaaaaaggttcttcaagacaagagatacaagaatcgtgagctgcaaaccatgcgagtgcttgaccacccaaatgtggtggctctaaagcactgtttcttctcaaagactgagaaagaggagctttacctcaatttggtgcttgagtacgtaccggagactgctcatcgtgtcatcaaacattacaacaagatgaaccagcgcatgcctttgatttatgcaaaactgtatatgtatcagatctgtagagccttggcatacattcacaacagcattggagtgtgccacagggacattaagccgcaaaatctcctggttaatcctcatacccatcagctaaaattgtgtgactttggcagcgcgaaagttctggtaaaaggcgaaccaaacatttcttacatctgttctaggtactacagagctccagagctcatatttggtgctactgaatacacaacagccattgatgtttggtctgctggctgtgtgctcgctgagctgcttctaggacagcctctgttccctggagaaagcggtgttgatcagcttgttgaaatcatcaaggttctgggcacacccacacgtgaagaaattaagtgcatgaatccaaattataccgagtttaaattcccgcaaatcaaagctcacccgtggcataagatattccataaaaggatgcctgctgaagcggtagatctcgtgtccaggcttctgcagtactcaccaaaacttcggtcgactgctttggaagcattggtccatccgttctttgatgaacttcgggatccaaacacccgcttaccgaatggtcgttttcttccgcctctcttcaattttaagccccatgagctgaagaacgtgccggcggatttcatggtgaaattggtccctgagcatgcacggaagcaatgtgccttcgtagggtggtgatctctggataagaggatgacgactcgatgattagctgaggaccaagttaatgtctgttagaaactgccggagatcgacattgccagatgtggtgtggtataagataggcaatatgtgtgattattttttgttcgaggttatcaccccccttgccccagaaaagatgagaagatgtcgatgtaacaagccctctgcgcttctgtaagtagatgagtgttgctgcatgccccctgggtacatgtatcggtttgagcagaattctgtttgcctgaatcgtgccatcaccacgcagggatccatcccttgtgtgacgatgttcagcccaacatttgtttatggattcaggctattcgttcatttgtactcctcgcatcctatggatgattaagcaatatttgcaatttttctaaaaaaaaaaaaaaaaaaaaaaaaaaaaaaaaaaaaaaaactcgagagt

SEQ ID NO: 5331 - DNA, 1655 bp, Zea mays
ggttacgacgaccttgccactacttgacgttttaaccggtctcgctcgagatctctagagaaatgaatgttgatcacaagctcccagagtcacggacttggtttcgcattcataagagcatctccaatattatgacttataaaattaccttataattaaaaaatagtatattttatagaatttaagttactaacaaaacatttcgtttcaacggtaaagcctcaaatataaattatagggcaaccaaatgtggtgtaatatatttaagttaattgagtgtgtatcctatagttttttgaccaaattttataaaataaatagttttttttctatacagaccccctttcaatctgagacatcagttaggatgtaatcaagtggacagagatcttagtgtgaaggcgaagcccgctgtccacagtccacacgaagctcagcgctcggtaggcaaaacgagcgagcgcggccttctttagagaaaaaaaaaacgcgaaacgcactcccagtcccagcgtcactgacgccgtccagagaacgcgcgcgcacattccccgcgtattctgttctgcgagacgccgcgagcctttaccggccggcgaacgaatccacgggtggctctgccttttgctattatagtctttaggggagaacagaaacttggcttacatctcaagcgcaccatggattggatttggcccgctcgcacacaagtcgcctgctgcttccgcacatcccacggcatattaccactcggcgaaccagaccagaccacgacgtcgcgcgcggccaccactgggctcgtcgccgatcgctataaaacgcggcgggtacctcgaggccggccgggaagccgagaccaagaaaacacaagtacagactacagagccatctttgatctttccagtccaagatgagcgtggagatcctcgacgggcggacggtgcagagcttcgtggaggacgagcgcgcgttcaactcgtccgtggacgcccgcttcgcggcgctggacgtggaccgcgacggccgcctctcgtacgccgagatggccggggagctcatggcgctgcgcgtgcgggaggcgcacttcggggccgacgcgccggcgcccgcggccgagctcgccgcgctgtacggggcgctcttcgcgcgcttcgaccgcgacggggacggcgccgtggaccgcgacgagttccgtgccgggatgagggaggtcatgctcgccgtcgccagcggcctcggcgtgctccccgtgcagatggtggtcgaggaaggcagcctcctcaagtgggccgtcgacagggagctggccactaccatgccagcttgaccagctcggctccatcagctagctgcctgacagtgtgcactagcgctagtgtcacctctagctgaatgggagttttatcacctatgtatgtatgtaaccgtacgccgagggtgtcggtctaatttgggctcgtttaacgttttcgtgtttgtagacctgacatgagtatgtaacgtacgcactgaaccttttttatcagtccgaaaagtagcgttttacacttttactccaagagacttcatgcatcgttgcaagatgcgagttgtaaaatggaattggagcaccacccacccaatctcctcattggaggcttggagccctccttgta

SEQ ID NO: 5332 - DNA, 946 bp, Zea mays
attacagtctcgagcacgtttcacgagcaagctcgttgagttcagtcactcgaaaatctatggggctggggctgcaaagtatgttaaggtggtcgatgatgctgtacatgagctgtataaggagtatgtggctcagccactcccactgaccccagcctatgttgaccaaggcgaagggaataatggaccagccaatgcgaacagcagtcaaggggctcctgcttccactggtgatgggcttctagacttcgatatgtacctttctgagatccaaagtagccagccctcgaaatctgagctggagcagtacctggatgaatccctcactccacgtatccaggagtttgatatcctgaactggtggaagctaaacacggtcaagtttccaaccctctctaaaatggcccgtgatatcttggccattccagtgtccatggtaagcagtggcagctctatattctgtgctggaacaggaagtcacatgctcgatgactacagaagctctctgcggcctgagattgtggaagcacttgtttgcgcgaaagactggctccagtattcaccacctgccaccgaggcaccgagttctgcactggtgaaggctcaaggatcgtaggtttgtcgtggtcactgcctgccttgtggaagcaaagcaagaatccatttacccatctgtcgtatctctgagtgtagttaactgtaggtgtattgtaggctgagattgtgaaccgattttgatatattctggtatttatcacgtaaaggtgtaacatgtgttgaactctgctgaactcgtggctgttctgatgtcgtctgaccctttgcagtttgcacgcttccctatgtgcttgtacaagccgtgggatgtatcttgtttttgtattaaatttgttttataccgtggattgatgtctcattaccctaaactaccaactaaaattggggg

SEQ ID NO: 5333 - DNA, 3966 bp, Zea mays
cgggaagaccttccgagcagcacctcgtccgcttggcaatgctgtggcatacgtcaattcagctttcttggcaaggacttcagtggatgcagcatcaagggaccatctcattgaggatatatgtttggtgttcggtgcatatgggactgatcatgctattagagctagcaaggttgaggattacctgaagggcaaaacagtgagctcgactgttatacttgaagctgttcggttgcttaaagcgactgtcaaaccatcagaaggcacaacacatcctgagtatagaatcagcttggccgtcagcttcttgtttaccttcctatcttcccttgtcaacaatgagtcaacaaaggttaatggtcccaacgggtcatgtagtaatggagccacaaacggtgcccttgagcactcaccagagaagcatcttaagtttgacagcaacgatttgccgatacggtcaagacaagaaatatttttaactgatgaatacaagccagttggaaaaccaattaagaaagcaggtgcagagatccaagcttcaggggaagctgtgtacgttgatgatatccccgctcccaaagattgcctctatggagcatttatctacagcacccaccctcatgcccatgtaaaggctatcaactttaaatcatctttggcttcgcagaaggtcatcacagttatcaccgcaaaggatattcccagtggtggacaaaatattggttccaccttcccgatgatgggagacgaagcactttttgcagatccagttactgaatttgctggtcagaatattgggggtgcctcggcgccggcccggaagtatgcctacatggctgcaaagcaagccattattgagtatagcacagaaaatctgcagccaccaattctgacgatagaagatgcgatccaacgaaacagctacttccaagtccccccatttgtagctcctaagccagttggtgattacaacaaagggatggctgaagctgatcaaaagattctatcagcggaggtaaaacttgaatcccaatactatttctacatggagacacaagtggcgctagctattcctgatgaagataactgcataaccatctattcttcgacacaaattcccgaggtcacacaaaatgtggttgcaaagtgccttggcattccatttcacaatgtccgcctcatcaccagaagagtcggaggaggctttggtggaaaggcaatgaaagcaatacatgttgcatgtgcatgtgcggttgctgcattcaagctgcggcgtccagttcggatgtacctcgatcgcaagacagacatgataatggcaggcggtcggaatcctatgaaggtgaagtactctgttgggttcaagtcagatggcaagatcacagccttgcacattgatcttgggatcaatgctggaatatcaccggatgtgagcccaatgttgccacttgctaccataggtgctctcaaaaagtacaactggggcaatcttgcatttgacaccaaggtctgcaagacaaatgtctcatcaaaatcagcaatgaggggtcctggagatgttcagggctctttcatcgctgaagccatcattgagcatgttgcctcagcactttcagtcgacactaacaccataaggaggaagaaccttcatgactttgagagccttgtggtgttcttcgaagatgctgcaggtgaagcttctacctacagcctagttacgatgttcgataagctggcctcctctccagaataccagcgccgagctgcaatggtggagcacttcaacagaagcaacaagtggaagaagcgtggcatttcttgtgtgccaattacatatgaggtcaatcttcggccaactccaggcaaggtgtctatcatgaatgatggttccatcgttgttgaggtcggaggggttgagataggccaagggttgtggacaaaagtgaagcagatgacggcattcggattgggacagctgtgccctgacggcggcgaaagcctcctggacaaggtccgggtcatccaggccgatacattgagcatgatccagggagggttcaccggtgggagcaccacttctgaaactagctgcgaagctgttcgacagtcgtgtgttgcgctggttgagagactgaagcccatcaaggagaatctggaagctgaggcaggcacagtggaatggagttccttgattgctcaggcaagtatggcgagtgtgaacttatcggcacatgcatactggaccccagatccaactttcagaagctatttaaactacggagctggcattagtgaggtggaaattgatgtgctgacaggagcaacaacaattctaaggagtgaccttgtctacgattgcgggcaaagcttgaaccctgctgtcgacttgggccaggtggaaggcgcattcatccaaggagtaggcttctttacaaacgaggagtacacaacaaactctgaggggttggtcatccacgatggcacatggacgtacaagatccccacggtcgacaccatcccaaagcagttgaacgttgagctgatcaacagcgcccgtgaccagaagcgtgtcctctcttccaaagcatccggcgagcctccgcttcttctagctgcctcggtgcactgcgcaatgagggaggccatcagagccgccaggaaggaattctcggtctgcactggtccagcaaactctgccatcacgttcgagatggacgtgccggcgacgatgcccatcgtcaaggagctctgcggcctggatgttgtggagaggtacctggagagcatgtccactgccggaccaacaaccactgccaaagcatagatccagcaggtgcaccgcccatggtgagagagcttaataggtctgtgtaaaacactgaacagcatgacatgccaagcttacatgtgttagctctgatgtacagaagacgaggtagcaatgggagctgtggtcttgtgaatcaggatccatgaacattagaggaaaaaataaagtaaataagtgtcgggcaggcaaatgtgtggatgaaatcatgtggttttgattggattttgaagaaatttttgcaatgaatctccgttcatactacaaaaaaaaaaaaagcctactgggtacatgggggataggattgtaccatccagctaggtttggccttgctgtctcgttgtgaccttcaccggtagctactccctgcgcacctatttgaactagcagagcagtgttgtgaccttcaccggtagctacttactccctgcgctgcgcacctatttgaactagcagagctaaaattactaaggaagacatatcaactagtaatgctatgggctaaattgctccaacctgtttgaactcagcctaaactaagatgggcactacatgtaaatagtactccatctgtttcgtttcaaaatagtagtcgttttagctctagatttttatttttatattcatatggatgataacgaatctagacacatatatagaacacatatattaattattgtatgaatctactacaagagtaatgaattttaatttgagacggagagagtaatgtactagaaaccataggcacggcgttgccgcaccagcttgggctctcccatcggagaacctgtaggagtgtaggtacagatgtacagtattttctattggtcaatttgttcttgtcattaatttttaaagtcgtatctgtaatggttgacgactgataagcagaaaagtgccaaaagtaaatggattgcacagcatacaactaatcatgtatgcatcgctctaaatctataatatagaatagggagagtgacgcatggaaatctcaaccatgcacctgatgataattacagttagtccttgcttatattatagaaatttgcctactgtcctcttaaagcaacacaaaagaagaataacgtttagctattgaatttaatagaccaaaggggagaactgagcaaacaaaa

SEQ ID NO: 5334 - DNA, 2530 bp, Zea mays
tattttacgtggtgccctggtcccgtcctcgtcagggcctcgccgtcgcctcctcttttttcccccctcctcgacggctcctcctcacaggctcacagcctcacactcacgcggagagcgctcgcgcgggcgcacacgcggaggggacgttcacaggagggggagggaggagatgccggggagccagaacggggggccgaggcctcggccggtcaaagccgagaccatccacgatcttgcgcgcgccggcgacctcgccggcgtccagaggaagctgctggagaacccctccctcctcaatgacaaaaatcccgtgatgtgtcaaacaccacttcatgttgctgctggctacaataatacagaaatagtcaagttcttgcttaaccagcaaggtacagaaacagttgatctggaggcaaagaacatgtatggggagactcctctgcatatggcagtgaagaacagttcttgtggatcaacaaatctactccttgaacatggtgcacacatagaagccaaagccaataatggcatgacaccattgcatttagctgtctggcatgcaattcaagctggagacttcagcacagttagcgtgttactaagctacaaccctgattgctttgtgaaagatgatgaaggcaaaatgcccttaaatcatattccaggaggagctggtagcgagaagctgctgaaactcctcactcatcatatggaagagcaaagaaaacggaaagctctcatgtcatgcctcgaagggaaagcaatgtcagagtttgaagaggcaatgtcacaaattgttggattgcaggagctaaaaatgcaattgcgccgatgggcacgaggaatgttttttgatgagaagcgacgggctatgggcttggggattgctaaaaggagagctccccatatggcatttcttggcaatccaggaactggcaaaactatggttgctcgaattcttggaaagctcctccacatggttggaattctccctactgacaaagtaactgaagttcagcgaactgatcttgttggagaatttgtggggcatactggaccaaagactaggaggaagatacatgatgcagagggaggtattctcttcgtggatgaagcttacaggttgataccaatgcaaaaatccgatgacaaggattatggtttagaagccttggaggagataatgtctgtaatggacagtggcaagatagttgtcgtatttgctgggtactgtgagccaatgaagcgagtcatcgcctcgaatgatggcttctgcaggcgggtcacgaaattcttctatttcgatgatttcagtacgacagaactagcagagatcctacatatgaagatgaagagtccaagtgactgtagcttgctttacgggtttaagctgcacccaagctgcagcattgaagccattggagagctgattgccagggagatcactgaagagcagaggaagcagatgaatggaggccttgtagacacgctgctcatcaatgcccgcgagaacctggattcgcggcttgatttcaactgcaacgatgccgatactatgatcacgatcacgttggaagacctggaggcagggcttcgtcagatttccagacaacgtcacctgcagtgacatgtaaatttaggagaattttttctcgatgatctcatgcttgtctccaagggcgaagttatggctgtatcgtctcatccaacgtttttggctattctgactgtgttgtatctagtcgttgctatatagcagtaaaatgcatgtggtatatacaattatacatcatgccctaacaatatttgacatctgtggaatagccagtaccacatacggatttcagtacgtgcataatcaattcagatttgatggttgaagtgattgaatttgaatcctaactaaaccttgacgaccgatttttctttttacgaatccattcctttacatcactccattgtcatctgatgacattcactttcaaaaaaaaaaaaaggagagagaagtggctgttcacatgccattgagctgtgctcaagtgcatgagcgcatctgtatgtggcaagaccatacatgcactaaaaattaaagcaagcaacctcatgtgcctccagaatagtgtagatcccagacttgccgtcttgcactgcattgccgttcggtggaatggaatcttgctttactgctagcagtggaaagtagatctgcagcgtggatgcctacgcaaggtctgtttggttgagttagtttttcttaaaaaaaactaatatgatctatggattataaagtgttcaacaagttacccacacccacatgatcatccaaaatactgtttcacactgtataatacactgttcatataatgaagtttgtaatagaagataagatgagagataggatggataacctgttggagatagtctaagggcctttttaacatggcttttgcatcaccagctctagctttggctcatctagaaaaatagctccttatttttaggagactttggaggatcattttgttgg

SEQ ID NO: 5335 - DNA, 2667 bp, Zea mays
tggaggtggagggagcgaagccggattgttacacggcggtcggggcgctctcagcgtgcacgaggttaggtgcattggatttgggatgacaggcggttgaaatagtgcactaggatgaggtccttgacaacccagtcctgggcactgcactgatcaatatgtatgctaagtgttggagcacaagagaggcatggatggtgttccagcagatgttggagagggacatcattgtttggaatgcgatgatcatggggcttggcatgattggccacgagaagattgcatttgtgcttgttggccagatgaagaactcgggtgtgaagctgaatgataataccttcattggattgctctgcagctgcacacatactagccttgtgaatgatgggcggcggtattttcataacatgactcatgtatacagtataagccctaggattgagcattatggttgtatggttgacctgttgagtcgtgcgggattgctggaggaggctcatcagctgattggtgacatgccaatgctggcaaatgccgttgtatggggagcacgcctcggtggttgcaagatccatcggaatgctgaccttgctgaatatgtgctgaagcagctcatccgactggagccatggaattctgggaactatgtcatgctttctaacatttactcgaacagtggaagatgggaagatgctgcaaagcttaggttggaaatgaaggcaaaggggattgagaaggtcgctgcctctagctgggttgagcttgatgataaggtccacaagttctatgttggggacgattcacatcctctttcagataagatctatgcaaagcttgatgaattgggccacggcataccttgtagattgagcccatagcagcccatatatgaagaaaaaacaaaagaaaaagagcccaacacgtaacaagcaacatctcgcattgattttgaagcgtgagaatctggtctgcttattctgttcgctgtgtttctttcgtccactcagctttccgcagccgccgttttacgttagccaattctgctgtcagcttgccgctgtccgctcgtcctttgagctttggttgtgtctcccaaatatcttgcctttttgttgcattggactcttctgtggttagaatggcagcacccaagcccatttctcgtcttatttctcacgtcattcttgatttggatggcaccctcttaaacacagattctgttgtaagtaaggtagtaaaaccatttattctaaagaatggaaaaacgtgggatagcaagaaagctcacaagctagttgggaagacaccttatgaagctgcagctgttgttttagaagactatggactcccttactctacagaagagttcctctcgatgattactccgatgttcagtgagcagtggtgcaacttaaaaccacttccaggagctaatcgactgataaaacatttaaagactaacggggtgcctactgctttggcttcaaactcaccaagatgtttcatagaagccaaaattttcttccaacaagggtggaaagagtctttctctgcaattgttggtggagatgaagtagagaaggggaagccatccccgaatatatttttggaagctgcaaagagaatgaactgtgctccttcaaattgcttagtaatagaggattccttgccaggtgttacaggtggaaaagctgcagaaatgcatgtcatagctgtaccttcaatacccaaaaagactgctgagttcagttctgctgatgaggtgatcaattccctccttgatgtgaggcctgaaaagtgggggttgccaccatttaatgattggattgaaggtaccttaccaatagaaccatggtttattggtgggcctgtgatcaaaggatttggccgtggttctaaagtactaggaataccaacagcaaatttacccgcggagaatttttccgacgtagtgtcagaacatacatcaggggtatactttggctgggcaggactttcaacgcgtggtatatataagatggttatgagcattggctggaacccatatttcgacaataccgagaagacagtagaaccttggctgcttcataatttcggcgaggacttctatggcgaggaggtgcgccttgccatcgttggctacataagacctgaggccaactttccttcgctcgagagcttgatagagagaattcacgaggatggaagagtagcagagaaggcactagacctgccaatgtatgccaagtacaaagactcgccttatctgagaaacccttcgaagcacgggagtagtactaccggtgggacccagtctgagatggattccaagtgacaacccccctacagggccactagataatatgttacttattttccctatggtaaatgcgtcggtgttgatgcagaaacaattggactctctgtgagctaactcgcttcttaattttcggaagtagatagtattcctcgaagtggtgtttttactttgtaatatagaaaaaaataaagtggggttgttgaaacttgagagtcaaattccgagacgttatgcacgttttgatttctgaattaatcgattggtatcacttgtactgtttttataaaaaaaaaaaaaaaaaaaaaaaaaaaaaagaaaaaaaaaataaaaaaaaaattatatttttt

SEQ ID NO: 5336 - DNA, 3027 bp, Zea mays
  misc_feature (841)..(841): n is a, c, g, or t
ccccgcgtccgcccacgcgtccgcccagcgtccgaagagtcaaaactctacatgagcatctcaaatgttgcacacaagcataaatgtacttgtttgagcttaaaaaaacttaacctgtagggggtaagacaacccctgggcacctggtccacccatacacaacggcaccatagcccatgtgagaatgactgcgactagggccgggccttgggcctgtttgtcatgggagtatgggacaaagtaggggatatttttaaccttagcctgaaatttactcccgtgaggagtcaaacacaggacctgtgtagtgctactcagaccccctatccattcgcctggtttgagcttatgctgtacgatttctgaacttgaaaatatgtatttgagatgaatatcccttgcggtaaaaactaggacaattatgcttgtaactttatttctgtaaatttgctttaagtaggctggacaatgatcttgaaattgtgacgtgtttgttttcattgcttcttgcttggggtctcaatttaccatgcttggtttcccgggaaagacaatatggattttgtaggaaagagcaaggtgatgttggagccttcggcactgggtctgccctcctgtgttgccctgcatatacttgtgaacgaggcagcatcatagcttcatgtttggtattttgttgttcaactgtgcaaggactgtagtcctatttttactcatcagggcaccacttcttgatcccatgctatctctacatagatgttcaactgtgcgaggactcttagtcctatttttgctcatcagggcactacttcttgatcccatgctacctctacatattctntatgaggctagcttatagtagattacttattccaaaaaagctgctcatttgtattgccaagagcagtttcaaaatctcttttttcatgttaattgcttttcacaggatcttcctaggcactatctgctaattgttctttatttcactcaaggtttatgttattaggtcatggttcacaaacatttttttcctcatgcagtatttgctggttttcagagttgatgctaaacatgcttatttaactaaactagaaatttgttaccgaggttagcgccaagctgcctatccttcatgcaattgagatttaatttgtccaattgtcagtttaacgggcaatggttttgaatttatgctgatgatgtaatttaattgcatatttgcctgctgacttgtgaacgaggcagcatcatagttcagtttggaaacatgtcatcgaagaagatagagttggatcacaaggacatggtccatgattctgccatcgactactatggcaagcgccttgccactgcctcttcagacttcaccgtgaagatcgtcaacattggtgctgcaaatgccccatcccaggtccttgcaacgctaagtggccactatggtcctgtgtggcgtgttgcttgggcccatccaaagtatggtgcaatccttgcatcgtgcagttatgatggccgtgtcattatttggaaggaggatgcacgaggcaattggtctcaagtccacgtcttcagtgacaacaagtcatctgtcaactccattgcttgggctccgtatgaggttggcctctgccttgcctgtgcatcttctggtggaagaatatccatcttgacgatgcaagctgacgggggttgggatactgcaaccattgagcgagcacatcctgtcggtgcgactgccatatcctgggcccctgcaacagcgtcactagctggtgcaggggagcttgtttacaagcttgtctcaggagggtttgactctgttgttaaggtctggggattcaacaatggtagttggaagctggagagtgctcttatctctgacatgcacacagattgtgtgagggatgtcgcctgggcaccagttttgggattgtccaagtcgaccattgccagtggttcacaagacgggaaggttgtcatctggaccaagggaaaggatggagacaagtgggagggaaagctcatgcgtgacttcggttcccctgtctggagggtgtcgtggtccttgactggcaacatattatgcatagctgctggcgagaacaacataaccctctggaaggaagggtcagatgggcagtgggaggaggcgatgaaggttgaaccataggatgaccggcaaggtttctgaatttcttgtagatccatgtttcgacaaagacaaagcttgctactgttttactagtgtttcgacaaagtttaagtttgccattgtgttttactagtgtttcctgcggatccatgtttcgataaagacaaagcttgacattgtgtttccatagacactcaaattcacatattttagtaattcctgatgagcaattatgctcttggatggatctggtgcgctttagactgacaaattttttattcaggaaacactagtaatgttacctattaaacattgtagcaatttttatttttaattgtgctgtcttggatcttggtccaccaaaaaaaaaaaaaacaaggtgtatttggtttagattctgaagcgaatctggaatctcaaccaaatgaggacaacagaatatattcttgaaaatatatgtatttttctagtttaatttagaattaccttcgatcgatgacttgtgttagcaagatatgcagtgtagttatgttatgtaggatcaaacgtggaagtctcatgtatccgtgatccatcatattactgagctcttgagctctctaatgttgtgttcatcgtctccatttcagatggaacttaagcctatgaccccttctgagcattgtttttagcatgtttttaaggttcaacaatttaaccaaacaataagatgttacattttaagaacaatgtcttcatgggcttgcacattgttctttggtagcaagggtgagtcggtcaaacaatagctttgttgacataatgttctgcattggtgttgtatagactttttggccatgaaaatcaaccatctgaatctagtcctaaacaaatctctc

SEQ ID NO: 5337 - DNA, 2001 bp, Zea mays
gttcggtcaccaaacagtcagcgcggggcaggcggtcagcgcagggcagggcagcctgaaagaaagcggcggcggcagcaggtcactggctcactgctctgtcctctcgtctccagagtccagaccaccgcatcgccatggcgccgccgcagacgatcccccggcgcggcctctttattggcggggcctggagggagccgtgcctcgggcgccgcctgcccgtcgtcaacccggccaccgaggccaccatcggcgacatcccggcgggcacggcggaggacgtggagatcgcggtcgccgcggcgcgggacgcgttctcccgcgacggcgggaggcactggtcgcgcgcccctggggccgtgcgcgccaacttcctccgggcgatcgccgccaagattaaagacaggaaatctgagctggctttgctggagacacttgattctggaaagcctctggatgaagcaagtggagacatggacgatgtcgctgcatgctttgagtactatgctgatctggcagaagctttagatgggaagcaacagtcaccgatctctctgcctatggaaaactttaagtcgtatgtacttaaagaacccattggggttgttggactgatcactccttggaattatcctctgttgatggcaacttggaaggtcgcacctgccttggctgctgggtgtacaactatattaaaaccttcagagttggcttctgtgagctgcttagagcttggtgcaatatgtatggaaataggcctaccaccaggtgtcttgaacataattactggtctgggccctgaagctggtgctccattatcctcacattcccatgtggataaggttgcttttactggaagtacagagactggtaagaggataatgatttcagctgcccaaatggttaagcctgtttcattagagcttggtgggaaaagtcctcttattgtctttgatgacattggtgacattgacaaagctgttgaatggaccatgtttgggatcttcgcgaatgctggtcaagtctgcagtgctacttctcgtttactgctgcatgagaaaattgcaaagaaattcttggatagattggttgcatgggcaaagaatataaaagtctcagatccactggaggaaggctgcagactgggttcagttatcagtgaaggacagtacgagaagataaagaaattcatctcgactgcaagaagtgaaggtgccacaattctgtatggaggtggccgaccacagcatctcagaagagggttctttcttgaacctacaattataacagatgttagtacgtcaatgcaaatttggcaagaggaagtctttggaccagtcatctgtgttaaggagtttaggacagagagtgaagctgtggaacttgcaaatgatactcactatggtttagctggtgccgtgatctccaatgatcaagagaggtgtgagcgcatttcaaaggctcttcactctggtattatttggataaattgctcgcaaccatgcttcgtccaagctccttggggagggaacaagcggagcggttttggtcgggagctcggagaatggggtcttgataactacctgacagttaagcaagtcaccaagtattgctcggatgaaccgtggggatggtaccagcctccatctaagctgtgaaggggcattcactccagggaatgtaatgcatcattaactgacagcatcagtcctgttaatggacaggagctcgtgtacagtacagtgctcgtaaaaaaagctctttgatggtaaagttgcttgctgctatcactactccagaccagaattcaggactggagagtacgatgtcatgagttgtactacttgttagtctgcactcttatcattcgaagtttggcagtggtgtgtagttgcacttggaagattgcaataataataaagataattggataattgatccattttaatcacttttctttaaaaatgcaaaaaaatcgtaaatattaaaaaattggggggc

SEQ ID NO: 5338 - DNA, 1612 bp, Zea mays
ccacgcgtccgtaatggtactagttgggtcgtgagaccaggaaaaaggaagtcagggatactttcgtcaagaccgaccggtgtcgtgtcgcctgctttgaaaaatcatacaacaaccaactaaaataacattgggtacctccaacgcggcccggacgcacacgcgcatcccggcagtcagtagcgcagctgcctctcctctctttggcccccggagccggagcaagagcgccgccaacagcccgctaccggcgccgtgtcatggcgggggcaggagacaaggtggactacgtcttcaaggtggtgctgatcggcgactcggcggttggcaagtcgcagatcctcgcgcgcttcgcccgcaacgagttcagcctcgactccaaggccaccatcggcgtcgagttccagacccgcaccctcgtcatcgaccacaggagcgtcaaggcccagatctgggacaccgccggccaggagaggtacagagctgtgacaagtgcttattacagaggtgcactgggagctttgctggtctatgacattaccagacgccagagcttcgatcatataccccgctggctagatgaactccgagcccatgccgacaagaacattgtgataatgctggttggcaacaagagtgatctcgaggagcagcgagcggtgagcactgaagatgccaaggagtttgccgagaaggagaacctcttcttcctggagacctctgcgctccaggcaacaaacgtagagagtgcttttcaaactgtcttgacagagatattcaagatccacagcaagaagaacatggtgtcggagccgaagagcaatggagctgccccagcaatgccggggacaaaggtccttgtcccaggtccggcgcaggaaatcccaaagagcaagtgctgcagttccatgtgatgcttctacgtttggtgctgggtgggttgaaaatatattcacgcaacattgtgttggttttaaatccctgctgaaatacttgggttttggcgggattgtattggaacaccggtgtattttagatatctgtcacaattgtgacatgagagaaggatgtgctgatgtattagttctcttgttctctaattgatacgttttatccctgctgcaaatatctgtagcaccgattgtttttgagatgcgaggtgtgaatttgccgtgtacaagaaataatccactcatctgtccggcccggtgcaatcatactttgtcgttggagctaaacggaaaagataaatgtaggccctgtgtagcatggttctaactccagatctctgctcagagttgaattggtgatccaaattctaggtatgtggaggcaagcgaaacggaggccgtcgtcgatccgacttgggcctgcgaagccagtgcacatgcagatctgtcacgtcagcttgcgttgtgaggcgcactgcaacgctgcactctctcctcccccttttctccgtgtacgaatatggtggttgcattaggtattaggggagctcttgaggggtaatctctcgcaccatttgcttgtaattgcaccgtcccgtttccgtctgtctgtctgtccaggcaagctaaagtatttaagcagatggtactgagagaactga

SEQ ID NO: 5339 - DNA, 3372 bp, Zea mays
  misc_feature (1150)..(1150): n is a, c, g, or t
  misc_feature (3327)..(3327): n is a, c, g, or t
gaggctggccgggcccccctctcccgtcgtccccacctcctcccggtcgcgcgcggtggccatgcctcccctcacaagctccctcctctcccgctccaccaccggcggctcctctacccgcgccgcggcagcggtcgcagcgatctccaggcccgccgcaccttcctcctcgtccccgcccgcccgctcgaccccgaggccgcgctccagcccggcgtcgcccttcgcatccggcctcgcgagccgcctcttcggcggccaccgcgccgtcgcccgctccgcgtcgtctgcagccgccgtcttcgagcgccggtttgcctcagcggcgaccaggaactcgtacgatgaaatcctgacgggcctcgctaagccaggaggcggagaggagttcggcaagtactacagcctgcctgcgctctccgatccgcggattgatcggctcccatattctataaggattcttctcgaatcggcaatcaggaactgcgatgacttccaggtcaccggaaaggatgttgagaagatcctggattgggagaaaagtcctccggtgcctcgtggccgcccgggcaagcccgctcgtgtcctcctccaggattttactggtgtcccagctgttgttgatcttgcttgcatgagggatgctatgagtaaacttggcagtgacccgaacaaaattaatcctctggtacctgtagaccttgttattgatcattcagtacaagttgatgtggcaagatcagcaaatgctgctcaggcaaatatggagcttgagttccatcgtaacaaggaaaggtttgggttcttgaaatgggggtcctctgcattccgtaacatgcttgttgtccctcctggatctggcattgtccaccaggtgaatcttgaatatctggccagggttgtgtttaacaatggtgggatcctttaccctgacagcgttgtaggcaccgactctcacacaactatggtagatggtcttggagttgctgggtggggagttggtggtatagaggcggaagctgcaatgcttggccagccaatgagcatggtcttaccaggtgttgttggctttaagttatcaggcaagctgaggaacggagttacagccacagacttggttctaacagtaactcaaatgcttcggaaacantggtgttgttgggaaatttgttgagttttgcgggcaaggcatgagcgagttgtcacttgctgatcgggcgaccattgcaaatatgtctccggaatatggtgcaactatgggtttcttcccagttgatggaaagacgctggactatttgaagcttactggccgaagtgatgatacagtggccatggttgagtcctacctgcgtgcgaataagatgttcgttgatcacagccaggttgacgctgaaagggtatactcttcctatctagaacttaacttggaagaggtagaaccatgtctatcaggaccaaaacggcctcatgatcgagtgacattgaagaatatgaagtctgattggctttcttgcttggacagcgatgtaggattcaagggttttgctgtccccaaagaatcacagggcaaagttgcagaattttcgttccatgggactcctgcaaagataaagcatggtgatgttgtaattgcagcaattaccagttgcacaaacacatcaaatcctaatgtaatgctgggagctgctttggttgccaagaaggcttgtgagttgggcctggaggtaaagccatggattaagacgagccttgcacctggttccggtgttgtgaagaagtacttggataagagtggtttgcagaaatatctcgaccagcttggctttcatattgttggctatggttgcacaacctgcattggaaattctggagagcttgatgaatctgtgtctgctgcaattactgagaatgatattgttgctgctgctgtgttgtctggaaacagaaattttgaaggacgtgtgcatcctttaaccagagcaaattaccttgcttcccctcctttagttgtggcttatgcattggctggcacagttaatattgattttgagaaagaacctattggcatctcgaaagatggaaaagaggtttacttccgggatgtttggccatccacagaagagatagccgaggttgtcaagtcaagtgtgctccctgacatgttcaagagcacatatgagtcaatcaccaaaggaaatcctatgtggaatgagctgccagtctcaacaagcactctctacccctgggatccatcatctacatacatccatgagccaccttacttcaaggatatgaaaatgagtcctcctggcccgcggcctgtgaaggatgcatattgccttttgaattttggtgacagcatcacaaccgatcacatctcacctgccggaaacattcacccagacagcccagctgcaaaatatctgaaggagcgtggcgttgaaaggaaggacttcaactcatatggtagccgaagaggaaatgatgagatcatggctaggggaacctttgccaacattcgtcttgtgaataagttcttgaagggtgaggttggacccaagacaatccatgttccatctggggagaagcttgcagtttttgatgctgctatgaaatacaagaatgaagggcatgacactattatcctggctggtgccgagtacgggagtggaagctctcgggattgggctgcaaagggcccaatgctgcagggagtgaaggctgtgatagcaaagagcttcgagaggattcaccgcagcaatcttgctggcatgggaatcatccctctatgctacaaagcaggggaggatgcagacaccctgggcctaaccggccatgagcgctacacggtccaccttccaaccaatgtgagtgagatcaagcctggccaagatgttaccgtgacaactgataatggaaagtcgttcacttgcacactcagattcgacactgaggtggagcttgcttactacgatcatggtggcattctaccatatgtcgctagaaagatagcggaacaatagattgtaccgtcgagatggttgcgatgcttgcggtgaatcgtaattggtgtaaacggtttgtttagtagtacaacccatttttgcggactacttataataacctctgagtatctcagagtgagctgtctgaaatttgatgaactgctacaattctggtgcgccatgaggatgggatccttttgccttctatgttaataatatgctaacttctgcaataccagatatacatttggcagaagattttgcacgctgtaaatgacactagtattaacactgatgcggtccaaaaaaaaaaaaaaaatgntatctgccaaaaagaaaaaaaaaaaaaagtcgacgcggccgcgaa

SEQ ID NO: 5340 - DNA, 2023 bp, Zea mays
aggtaaggatggcccgccggcgtggggaccctcgaggccggccaccgtcattccactccatcagtgggcagcgctctgctctcctccactcacgaactcactcactcactccccttgcccccatccatccgctagccactagctccagcaggctcgccgccgacactccactagtgctctgctctctccgctccactcacaaactcccctcgctccccccccccccacaaatcggcgatggatctgctgctgcggcggcggctgctggccgtggtggccacggcggcggtgctggccgtgtgcgccttcacggcggcggaggggttcgacatcctgcagatcctggggaagcacgacgagttctcgcagttctgcaagctgctcaacgagacgcacctggccggcgacatcaaccgcgaccgcacaatcaccgtgctggccgtggccaacggcgacatgggccacctcgccgccggccactactcgctcggcaccatccgccacatcctcgagctgcacgtcgtcgccgactactacgacgacaagaagctcaagcagctgtcgcacgccgccaccgccgcgtccaccttgttccagcgatccggatttgcccccggcatggcaggatacgtgaacataacgcagcaccgcggcggcaaggtgtcgttcatcgtggacgacgcggcggacagcgtcaagcccgtcacttacgtgaagcagatcgagagccaccgctacgactactcggtgctccaggtcagcggcgtcctgtcctccccggaggccgaggcacccgtcgccccgccggcgcccgtcaacctcaccgacatcctctccaagaagtactgcaagagcttcgcgggcctcctcgccgccgaccccaaggtcttcgacaccctcaacggcaccaaggacaccgcgctcaccgtcttctgccccgtcgacgcggcggtggccgccttcatgcccaagttcaagaacctcacggccaaggccaagacggccatcctgctgtaccacgccgtgccggactactactccatgcagttcctcaagtccaacaagggcaaggtcaccacgctcgccaccaccagcgtcgccaagaaggactacacctacgaagcggagagcaaggacgacaccgtcacgctcgacaccaccgtcgtcacctccaccatccaggccaccgtcagggacgacgacccgctcgccgtctacgcttgctccaagttcctgcagcctaaggagctgttcaaggccaaaaccgctgatctcgcgcctgcgccggctccacaagggcccaagaagaagagcaagaagaagcccaccggcacttcggcggcctccgcgccctcggacgatgaatctgcagatggcccgtctgccgacgacgactcgtccgatgatgccgcggacaaggctgccgccgcgccgtcgtacctgtccgctcgatgggtgaccgccgcagtgacgaccgccgtcgcgctggcgctggcggcgtaaggtgtgcgctcatatgctatgttttttttataacttattggaccccctatcttcttttcttttgtccaagtcgtgtcccttccttgttggtgaacaaaataagaagggctatttttgtttttttatatttattaccgcattccattaaaaaaaattagaggtgtgtgtgagtgatgtaagtcttgattttgttcattgggttgtggtgatcattttgtaatggtagtggccaatggaattggagagtgggttaagttttcacatatgatactatatataaggcatcatatggagtttagaggtgcagcagtgtttgttgtttacacatgctttcaaatgttagactatataagattttaccctgtacgtaacctattagaacgaataaaactaggttcgtttctttagaagtttaggatgtctccataataggaaggagagactctagcggtcggtgtcagagtcgatgtacaatggtgaaagtgtagaggcatcaatcttctccttaccgtgttagaat

SEQ ID NO: 5341 - DNA, 3078 bp, Zea mays
  misc_feature (1237)..(1237): n is a, c, g, or t
caattagccactgctaggctcgttaaatggttttgtacagaaactgcatctaaagttttgacaagtattgatttgaaattcatatgatcgtttacatcatatggaatatggatgatactattttgggaaaaaaccagagagtccttgttccacttgttctattcagtggttattgtttatttgtttttccacatagagccaattagtgtcattagcttgccaggaggactgcaaactatcctggagagcaggtgtgttactgtttaatatcaatgccctactggatataactctgtattttcacttataacatgttttatggattatgtgagctgacgtgctttatctggcatctgtatcatttcaaatttttcatctgatcctcctgtttctctggagcacaatggatacatatacattgctttctcatggcttgtttgtgagaaagaaatgctctaaacagacccaggtccccaggtgtttcggttgtttatggtggtcatgcattccaatttaggtccttctgttctagttgcacatatttagttctgatgtttatgatcactacagaggcaagtttttccttttaattcactattcccacctatacaacttggtggttgattaagagttgtattctcatgtacatagtctctgattcatgatacttattttatagttgggcccaaaaattaaggatctatattctctaaagtgtgcatagaccagacaagaagccagttaatagtgcaactaaagaagggttgtactggggaaagtaggtaaaaaggctaaaatttgggatccaaatacagtctgtgtcatgcataaattttatttggaatattcctgtatcatatatgttgaactctttcgcagcagaaggattccgaaaaccttgcatgaagctattttatgtgatatttgtgtctattatatgtaccttgtggctttgcaggttgctgtccaatcttttttgtgtgcttatatagtatcatttgaatgctgtctttgatgcttcattttatttaatttttttcaacttcagtaaagtagcatatctgatcattatatatcctgtcatttagcaatgaatagaatcttttagatagtagtggaagcacctttgtattatcatatatatctttggacatctattgaaactctattccatggtattgctattcaacatatatatatgtatatattcgtctagctgtccaatcttcattagccncatagttttgcgcgtgggcaacggtagatgggcatcactagcttgacgatcttgatcggtgagttgctccttccatttttcttggtggttatggaatttatctgcaatatgtcttgtgcttttgtatgtctgctatttgtgctgctattttttttctattatgtgcactatgtctctttgtcatatacatatacagatgtgcaaactatatttttgcagaatcgtgctaggaatccaatgtctggtggctattctcagcagggatatcgccctcctcgtcctcagtcaaactggggcccgccttctgtgccaccccagcagcctggctatggttatatgcagcctggggcttatcctggggcaccgccacagtatggtgcacctcagcaaccttatggtagctaccccccaacatctggtggttatcagactggatgggatcagtctcaaaaccagcaatctcatacaactccccctggtactgggtatgattattatagtcagcagcagcaacctcagcaacaatctgcccctgggacagctgcttctactgatgccactagctacaattatggtcagccttcgacgtatgcttcacagggatatgattctacctacactcagcagagtggtgggcagcaagcatatggacatgatggctacactggttaccagacccaagggcagcagcagggctactctcagcagactggttatgatcagcagggttatggcacatctgcttatggatcagctgcaagctcgacccaggatgggtccaactatggtggtcctggaggggccagtcaggcatctccagggcagcaaacatcaaacccagctgctggaagccaacctggctataccagccaaccgcccactagtgctgcagcaacttacccacctcaaggttcagctccatctggatatggcgctccaccatcccagtctggctatggcacccaaccaccacagcaagccggatatggtcagggcgcttatgggcagccttctccacagggccagaaacctcctgcattgtcaccttatggacaggctccgcctcctggttctgctcaggctggttacgggcagtatggttacagccaacctgcttacggtgcaccaccagcttaccctggtgcacccattgcaagccaccagggctatggccagcagcagtcttatggccagcagcagtcttatggcgatgcttatggtagtgcaagctatgggcagcctccagcctactctactgaagcaacacctcctgctgcatcccaggatcactctgctgcccctgctgcggcccttggaacaacagcttcgacagctcctgaaaacagtgggggcgcccaaacatccgctgaaacttgagcttcagcagctaattgggaacaaacattttccaagaccctgccgtgtggtttcctccgcgctgttgcttaatataattacgcatctaatttagggtctacaactacaagttatttatttttctgcctgttgtttttgacaccatgacttgctgtttccttgctatattgagtagtaccttgcagttattttattgctggcatatatgtctggactagtgatatatgtgtttgtgtggttacccttgttggaccgtaatggtctggacagataaatgcccatctatatgtattctgagccctgttatgtttgctctaccgtcggaggtttctatgcccacttcagctggtgatggttatgtatgaaatttggtttcaatattgcgtaagacttatgtatcggaccataaaaagtttaagcagcatgaaagtctgcctttttgttttaaaaaaaaaaaaaaaaaa

SEQ ID NO: 5342 - DNA, 1380 bp, Zea mays
gaatctccaagcacatcatgcgcccccccgaaaaaaaattccccacgtactagaccaccacccgttggctttctcccctcgcaccggggaacgcggctgccgatccgctcccgatcccctgccctcctccttccagccgactgagattccaccaaatcggcgcccgtgcagtccccgattcgattggcaagcacgattggccgctcctgatcagctacgggacagggctggatttgatttgatcggatccccaattgggtgtccgggtccgcgcgttcgggcgggcgggcgtgcgggcggggggattgctttagggtttcagcgggtgcggtcgctgtgtaggcgggtagggttttgccatggcggagaaaggctgcctgaaccggctccagaaggagtaccatgcgctctgtaaggaaccgccgccgcaggtcgtggctcgcccactgcccaacgacatattggagtggcactatgtacttgaaggaagtaaaggcacaccctttgaaggtggatattactatgggaaactcaaatttccaccggattatccttttaagcctccaagtatcagcatgacaaccccgagcggcagatttgcgccacacaaaagaatatgcttgtcaatgagtgactttcatcctgaatcttggaatccgatgtggtctgttgcaagcattctcactgggcttctgtccttcatgatggacgatgcactgacaactggaagcatcaagacatcagatgcagaaaagaggcgtttagcaaaagcttcccttgtctacaattgtgagagcaaaaactgtccgcacttcaggaaacttttcccagagtatgttgagaagtacaatcaacagctacaattggagaacactgctgcagagccggtgcctcaggagaatcctgcacctgctccatcccctgctgtccagcaagccccgaccgtggccaatagggcacaaccactggcggaggcgcgccgtgacaagaaccagaagaaggcggtgcccttctggatggtgctggtcatgttttcagttttcggggccgtgatggcgttgcccctaatgcaactttgacaataataaagacaataagaacgtgtgatgccagggccgtaattttgtatagttttccattggtttgtctgagtgactcagttggtcccctagactacctaccacctcggagtcgtattgatgaacctgtgatggtatatctgaagaacttttgttctcagttctcaaaaaagaaaaaaaacgccagaaggtccttcgtgtttgctttctgtttccgaaatcgtatacttaattttttttgttgcctcccagttcgtctttgtgatgtgtgctgacttcaaggttgagttcgcattttcac

SEQ ID NO: 5343 - DNA, 3146 bp, Zea mays
ggccgggccgggaccccatctccagcccctccgacgcggccccaccatctccacctcccggccgaacagacacggcccgccggcaaacgacaaatctcgcgacctctcgaaatgagcggtaccggaagcagcgtgtagcgcgagacgaacgccgccctaatccaaaccctagaggcgggaggaagacggcgagcgaacgcagcaacgattcctgatctctaatatcctagcacggcggcggccgcggccggatctaggggtaacgaaggatgtcggactcggcatcgatggcggccgccatcgaggcgcggttcagcagccgcgacctcatcggctgcggttccttcggcgacgtctataaagggtttgacaaggaactgaataaagaggttgctataaaagtcattgatttggaagaagctgaggatgacattgaagacatccaaaaggagatatctgttttgtcacaatgccggtgcccatatattaccgattattacggctcttatcttcaccagactaaattgtggatagtaatggaatacatggctggtggttctgttgctgatcttcttcaagctggtcctcctctggatgaaatgtctattgcatgcattctgagggacttgttacacgcaattgagtatctacattccgaaggaaaaattcaccgtgatattaaagcggcaaatatcctcctcactgaaagtggagacgtgaaggttgcggactttggtgtttctgcacagctgactaaaacaatgtctaggaggaagacatttgttggaactcccttttggatggcacctgaggttattcaaaattctgaagggtacaatgagaaggcagatatctggtctttaggtatcactgccattgaaatggctaaaggtgaaccccctctggcagatattcatcccatgagagttcttttcatcatacctcgtgaaaatcctccgcagcttgatgagcatttctcgaaaccaatgaaagagtttgtctcactatgtttaaagaagaatccagcagagaggcctagtgccaaggagcttcttaagcatcgtttcataaaaaatgcccgaaagactccaaagcttttggagcgaataagagagcggccaaaatttgcagcaaaaagcatggatgccacacaaaatgggcaaacacatgatgaagaggaggattttggtacaggcactatcaaggtcaataggacaaaagatacagctccatctttgagtcaaggaacagttaggaaatctgcagtcagagatttttctgatagatcagagggcacaggaactgtccgagttgtttcaaggcctcctcaaatcgcctccacgaaggatggtagatctgatatgcctcaaagtccaaaagcaccaatacgcacagctgatcgagaaaatcagtggaggtcatcagggactggatctgaagaatctctctctctcagagatactcagagcggacgagggagagtagaaagttctactgatgacaatgatcactctgtaagtgggtcaggaactgttgtgttacgctctccaagagcatctcagttgtactcaacagctagcaaccacagtgccaagcctcccagcagattctcctcttatgaagatatgtctaatagtgggacagttgttcggacccaaaatgaagacccagaaactccacgatcttcaaggtcaaggctggggatccaagaaaaaacatcaaatgctcctcttgaggatagtgccattaaccttgcagaggcaaaggctgctttgcaggctgggttaagaaagggaaatgctcgagaaagaccttttatcaacaggcatgaaaagggatcacatgagcatagatcttctggagtaaatagtcaagaggttcaaagtgaggatgtggacacgcagaaaggtcacaaattacggcaattacctgatgggcagtcagcctctcgtgctagttctgtagcttcacctgcagtctcatcattgctactcccttccctgaaagaggctactggtgacaagtttgatcggcctgctgttcatgccttccttgattccttgatggatttagaacgtgatatacctggatcatgcgaagtactggttggcagattgctacaccggctagggagctcaaaggattcctcattgcaaggtcttcaggagacggcgatgtcaattttcactaaggaacctgaacctccctctgaaaaagcaggcgacaagaagttagctaatatgccaccattggctgctcctaccgtgagcccactggcaaggttccttctcacaaggtggcaaaatcaagtttctcaagatcttaactctgtttgatccctgcgatgcagaaaagtgatttcatgttcgattcggtgtataattaatatttttcaatgtacataatgcaaactttagaactttatttcatccagtcggtctcaaccacctgttatttcatttgttttgttcatggcgaatactccctctgtccccaattaaaatttgttttacaattaatgtatgtgttgtatatatatgtttagtttcataatcatccatatgaatatggatgtaaaaatctagagctagtacgagtactatttttgggctagtttgagaacgtcatcttccaacgattttcattttctcaagtaaaattagtttattttttcttaggtcatgtttttctctttattttgaggaattggaatctaactaatgctacttttttttagaatgtgacattctataactatctaaagtttatatataagtatatctcaaatttgtgaatcgagacatggaaattgattctatagatttacatgctacttttttaatatataatttatattatactattttacttgcttctctatagtataaatgtagtgtatatctctcgcttatgatttaggacaatatacagacatattatatataaaaatatattaacttaattagttttgtttaaattataattattagaataaagtttaatttcaatgaaataaaaagggtcttaggaaattagagtttccaaacggagggagtaacatatttcttgccccttttccggtgttactgtcaccacaatacataacatatttcctgcccctgttcggtgttacttgaaagcatcta

SEQ ID NO: 5344 - DNA, 2427 bp, Zea mays
aagcgggtcaaaggccgggataagaatcagaagaaaaggacccgagcctagggttcggtctgcctcccacagccgccgctacgctttggctgcatcactcgctcctcttcggagcctccctttcgccggcggcgtaggaagagatggcagagcgtttgacccgtatcgccatcgtcagcgaggacaagtgcaagcccaagaagtgccgccaggagtgcaagaagagctgccccgtcgtcaagactgggaagctttgcattgaagtaacttcggcatcaaaactagctttcatttctgaggagctgtgcatcggttgtggtatctgtgtaaagaaatgtccatttgatgccattgaaatcatcaaccttccaaaagacttggaaaaggataccactcaccgatatgggcctaataccttcaagttgcacaggttgcctgtcccaaggcctggtcaggttttgggccttgttggaacaaacgggattggaaagtcgacagctcttaaagtgttggctggcaagctgaaacctaacttggggcgcttcaaaaacccacctgattggcaggaaattcttacatactttcgtgggtctgaacttcagaactacttcacacgcatattggaagataacctgaaggcaatcatcaaacctcagtatgttgaccacattccaaaagctgttcaagggaatgtaggacaagtacttgaacagaaggacgagagggatatgaaatctgaactgtgtgttgatcttgaattaaaccaagttattgaccgaaatgtaggagatctttctggtggtgagcttcagagatttgcaatagcagttgttgctgtgcaaaatgcggaaatctatatgttcgatgagccatcaagctaccttgatgtgaagcagaggctaaaagctgcacaagtcgttaggtccttgcttaggcctaacagctatgtcatcgttgtggaacatgatttgagtgtcttggattacttgtccgacttcatttgctgtttatatggcaagccaggtgcttatggtgtggttaccttgccattctctgtccgagagggtatcaatattttcttggctggatttgttccaacagaaaatcttcggttccgagatgaatctcttacatttaagattgcagagactcaagaaaatgctgaggagattgagacgtatcagcggtataagtaccctactatgagcaaaacacagggaaatttcaagcttactgttgttgagggtgaatttactgattcccagattgttgttatgcttggtgaaaacgggacagggaaaactacattcatcagaatgctggctgggttgttgaagccagacacggtggaaggaactgatattgaaattcctgaattcaatgtgtcgtacaagccccaaaagattagcccgaaattccagaataccgtgaggcatttgctgcatcagaaaattcgggattcctatatgcatccgcagtttgtgtctgatgtgatgaaaccactgcaaattgaacaactcatggaccaagaggttgttaatttatcaggtggagagctccaaagagttgctatatgcctctgccttggaaagcctgcagatatctatctgattgatgaaccaagtgcttatcttgattcggagcagcgtattgttgcctcaaaagttatcaagagattcattcttcacgcgaagaaaactgcatttattgttgagcatgatttcatcatggcaacatacttggctgacaaggtcattgtttatgaggggcgaccttctattgactgtactgccaacgcaccacagtctttagtatctgggatgaataaattcttatcgcatctcgacatcacttttagaagagacccaaccaactataggccacgtataaacaagttggaatcgacaaaggacagggaacagaagtcagccgggtcctactactacctcgatgactaatgaggaagtgcagattcttcttggagagccatatgtcgcataatctttccagagcatggaaaggagaagctactttgaagctaccactgcatcatggcatgtgacttgttgaataattggttgcaggagtagagtgcgccggttataacttataaagcagagcatgccgtgttgatactgagttttttgttggcttgacctatatgaagagaaggatcggtgttaaaatgagatttgcgagggggaactaatttctgtttttaagcaatactgtactgtcgttttgctatcaagtatatttgaccctcgattatatagattacattgaagtttttgggcaacaatgtgaaatcttgtgataaatctctgtgcttattggttatctgattgtaactcgtcctttgtaaactttgtttgaatgagcaagtgaactgattgtcgatagtttgttccaaaaaaaaccccaccc

SEQ ID NO: 5345 - DNA, 1518 bp, Zea mays
  misc_feature (1493)..(1493): n is a, c, g, or t
  misc_feature (1503)..(1503): n is a, c, g, or t
  misc_feature (1505)..(1506): n is a, c, g, or t
  misc_feature (1509)..(1509): n is a, c, g, or t
ccacgcgtccggactcctacaatcagcttaggatgcgatctcctcaggatttgaagggtaggctcactgtccaatttcaaggagaagaaggaattgatgctggtgggctgacaagggaatggtaccagtcgatatcacgagtcattgttgacaagagtgcccttctgtttacgacagtcgggaatgatttgacgtttcaaccgaatcctaattctgtgtatcaaactgagcacctctcatacttcaaatttgttggacgagtggttggcaaagctctcttcgatggtcagcttttagatgcccacttcactacctcctgcccctcccgcatacttggtgtcaaggttacataccatgacattgaagccatcgatccttcgtactacaaaaacttgaaatggatgcttgagaatgacataagtgatgttttggatctcacctttagcatggatgcagacgaagagaaactgatattgtacgagaaggcagaggtcactgattgtgagttgattcctggagggcgtaacatcagggttactgaggagaataagcatgaatatgtcgaccgggtagcagagcatcgattgaccactgccatcaggcctcagattaatgccttcctggaagggtttaatgaactcattccacgggagctgatatctatcttcaacgacaaagagcttgagcttctgattagtggtcttccagatattgacttggacgatttgaaaacaaatacagaatattctggctacagcatagcctctccagtcgtccagtggttctgggaaatcgttcaggggttcagcaaggaagacaaagctcggttcctccagttcgtcactggcacttcaaaggtaccgttggaaggttttagtgaacttcaagggatctctgggccacaaaggtttcagatacacaaggcatacggcagcacgaaccatctgccttcagctcatacttgctttaaccaactagacttgcctgagtacacgtccaaagagcagctccaggagaggttactgttggcaatccacgaagcaaatgaaggtttcggatttggctaatcagtcatgctcgtttgtccgtgagagtctgtacagatactgagcattgcaatgggcgagcagcacgtgtgtgctgatccttaccacattctgaactccacgtgtttgatggccggggagaacatagaagaatctccgtgggagaggtactgatgagagagagcgactattttgtgttcataatattcattaccttttttttagcttttttcggtcgttgcccagttcgtagtttttgccttacattggacttcgctccgattttttttctctgcttttccttcatagactggtgtaagctgtaaccgaacactgtcaaatgcaaatcatcttagggccccttcggttattactgaatggaggcatggaataatttctagccgtactgtttctctactatattaaagcatcagttttagtcccccncctctccccncnnccncaaaaatcc

SEQ ID NO: 5346 - DNA, 1806 bp, Zea mays
cattgggtacctcggggcccgccgggccggccgcccccggcccgcgcctcgctctctcttgtctcgcccgctagctcccatcccagcctcccaccgcgcccgcctgccccaacatcccccctccccgctccgctccacgcacggctccagatctgctacggcggcggccggtggacgccgcgccgcgcgtgccggaggcggtgacgtgagcggcggatcctgcccggccgtgccatcctggcgacgatgacagcgtaagcgggcggcggacgaccgcgcccccccggcccctactcccgaggtcattggcgtgtgctccttggcagaaaatggcgatgatggtggatccccccaatggcatggcaagtcaaggaaagcattactatactatgtggcagacactgtttgagatcgacaccaagtacgtgccgatcaagcccatcggaagaggagcttacggaatcgtttgctcatctgttaaccgcgagaccaatgaaaaagtcgcgataaaaaagataaacaacgtctttgacaaccgtgtggatgcgctaaggacgctgagagagctgaaactccttcggcacctgaggcacgagaatgttattgctctcaaggacataatgatgcctgcgcatagaaggagcttcaaggacgtttacttggtttatgagctcatggacactgatctgcatcaaataattaagtcatctcaaccactatccaatgaccactgccagtatttcctttttcagctgctccgaggcctgaagtacctccattcagccgggatactccacagagacctaaagccagggaacctcctggtcaacgcaaactgtgacctgaagatatgcgacttcgggctcgcccgcacgaacaacaccaagggccagttcatgacggagtacgtggtgacccgctggtacagggcacccgagctgctgctctgctgcgacaactacggcacgtccattgacgtctggtctgtggggtgcatattcgcggagctgcttggccgcaagccgatcttcccaggaaccgagtgcctgaaccagctcaagctcatcgtcaacgtcctcggcaccatgggcgaggccgacctcgcgttcatcgacaacccgaaggcccgcaagtacatcaagtcccttccgtacgccccgggcgcccccttcaccggcatgtaccctcaggcgcaccctctcgccatcgacctgctgcagaagatgctcgtgttcgacccgtccaagaggatcagcgtcaccgaggcgctggagcacccgtacatgtctccgctctatgacccgagcgcgaaccctcccgcgcaggtgccgatcgacctcgacatcgacgagaacctcggcgtcgacatgatcagggagatgatgtggcaggagatgatccactaccaccccgaggtcctcacgagaatcagcatgtgagtatgtgatgtgaccagacaggcagcaatgaaacatgtggacagaggtctgctgcgccaggatcatcacatgttcgcccttcttacgagcttaactgcgattacggcaccgagtcgaggtatcactacatgtatcggaaccgtcaggcggtctcttgtgtaaatatgcgctgaataaaatgtgtggcaatctcttgttttttgggttgtacatggacctcgctgttgtacgagtctgtgaagtggaaccctggtactaagacctgtaatttcagaccctaatctgttgtatggaaatctgaaggccttgactcccaaaaaaaaaaaaaaaaaaaggccgctcgcgatctagaacgggctcgtgcaaa

SEQ ID NO: 5347 - DNA, 2966 bp, Zea mays
cctcgaggccggccggggaccgatcctcggcaacggatatctcggctctcgtatcgatgaagaacgtagcaaaatgcgatacctggtgtgaattgcagaatcccgcgaaccatcgagtttttgaacgcaagttgcgcccgaagcctcattggggaccgcgagcccgccggccgggaagccgaagacgcgaccgacccaggcaggcaccactccgctcaacgcaccgggcggcacccaaatcccaaaccctagcacacgcaccatggcggcgcagcagaagatccggtggggggagctggaggaggacgatggcggggacctcgatttcctcctcccgccccgcgtcgtggtcggacccgacgagaacggcctcaagaaggtcatcgagtaccgcttcgacgacgacggcaacaaggtccgggtcacgaccaccacccgcgtccgcaaactcgctcgggcgcgcctctcccgcagcgccatcgagcgccgccagtggcctaagtttggggacgccctcaaggaggacgcgggctccaggctcaccatggtctccaccgaggagatcctcctcgagcgcccccgcgccccagggagcaaagctgaggagtcagctgcatctggtgatccgctggctatggcgagcaagggaggtgctgttctcatggtttgcagaacctgtgggaagaagggcgatcactggacctcaaagtgtccgtacaaggacctggcaccaccgactgaaactttcacggacaggcctccaacgtcagatggccctcctgcaccaggtggtcctgctaagggagcatatgttcctccaaccatgagaggaggtgctgataggactggagactcgatgcgccgcaggaacgacgagaattccgtccgtgtgaccaacctctcggaggacacccgcgagcctgacctccttgagctcttccgtgcctttggccctgtcagccgtgtctacgtcgcggtggatcagaagactgggtcgagcagggggtttgggtttgtcaactttgttcacaaagaggacgccgagaaggccatcaacaagctcaacgggtatggttatgacaaccttatcctccgagtcgagtgggcgacaccaaggcccaattagttttgccgctacctgctagaatcgcatatttctgttgaattatatcagtatgtttgtttgaattactggtacctgagtcatgaatttatcttgttggaaaaacctgttatgtgtggtttggttggacgagaataactatactcgcttcttttatattgagttcgcatgccgtttgttgtcagcaaaaaaaaaaaaaaaaagcaccacgaacgggtgatgattgtatggctgaacaaagcaaatttcatggtcgcaaggctggcaccttgcatagccttgaatgcttgatcctttgggtcagagactctaaaggttcagtggtttactagcatctcattcgatcaaaagataacaaaaaacgaacgactaaaccttatcagaaaacttgaaacaatgaccaaggagaattccttgttggcgtgagtgttctttgttcgagtcatctatatctataatgatctattaagaaactaatgtgggcatctgatgatactactgtttcaccattcgcgctgacgctctgggtccacccgccacatcgcacaaaaaataatgcagagcgagcattcgaatccataccccttcaccaccaaatcacacattttttagtgtttagaaataaataatagttatatttgagtatataacaaccatagtaaagcacagacttctggctagttttagatagatttcaccaggggttcagggatttgcctaaagtgtatgcaggaacttgttctcaaagacaggaagcgtcgacactcgatgagaatgaggcctgtgtgatcacaagtgcctacaaaagcaaaccgaatctggattaagaaaaaaaacagattattttttttgaaattcgcaggagagctacgtgtcattttattaaaaagaaagaagttatcagagatattaaaacctcaccccgtttggagctctgtccgcattcagcgggttctccagccatcctgataccgacgcgtggccgcatcctcggacccgagattttaattcgctctgtttgagtcgtgcattgtgtccgttgttcacatccatgcttctttgaatccttccccgctccctcgtcctcaccggcagccgccgctggcgtcgcccccatcccgccatcttccttctcgggctgccccgcgagtttctcctcgcacctgcgtctcctcgcaccccacagacgtcacaactgccacctagcctgccccctcctccgcgccaccctacaaccactcatgtcgtcgtgtcgctggcgtaggcgttgccgcccactcctaagccaacgccgccggtcgtcacttcaccgacgcttaggcacacccgtcctctttcgcaaccccctccaccgggatccatacctcttcttcccaacaacaaactcgccgccgccaaccccacctaccgagacctagccctcctctggtgacggcaacctctcgatgttcccgtccaacatctccgccctcatcgcggcgaccccatatgcttccggctcccgccacttcttcataagaaataaacctgctcgcatactctcttttctcttcccctgtctgtcgtgccgtctctcttcctccttccacaggtgtcgcctcagtccgtatcgacccctttccgatccccgaggcgaagctacgactctgccatagcgtttgagaagatcaaggtctccaacccaatcgtcgaaacagacggtgagatcccatcgcttatctttcaatttcttgatttggacatcaagtactacgatttaagggataatgcaccgtgaagcaattgatgacaagatcaccatgaaatttgagagtccacttcatcatatgtggctgagggcatg

SEQ ID NO: 5348 - DNA, 2294 bp, Zea mays
  misc_feature (7)..(7): n is a, c, g, or t
cgcccanaactcccgaaaccagcccaacaccaaagctcattccgcgcccccccggcccgcccgccctaagaacagagcggccacgctgaggagtgaggaggaaggtaggaggagaaccgtgagcagagagacatggcgccccaccaccagcagcgggcgctgctcctgttcccactcgtcttcctcctcctcctccttgccccgcccctcgccggcgcgtggggaaaggagggccacatcatggtctgcaagatcgccgagaagtacctgtcggagaaggcggcggcggcggtgcaggcgctgctgccggagtcggcgggcggggagctgtcgacggtgtgcccgtgggcggaccaggtgcgctggcactaccactgggccagcccgctccactacgccaacaccccccaagtctgcaacttcaagtattctcgggactgccacaattctcgtggccagcaagggatgtgcgtcgtcggggctatcaacaactacacggaccagctctacagctacggccagaagacttcgtataacctgacggagagcctgatgttcctggcacacttcgtcggcgacgtccaccagccgctgcacgtaggcttcgaagatgacgagggcggtaacaccatcaccgtccactggtaccggaggaaagcaaacctccatcacgtctgtgcctgctgcacctcttcgatgccagatttcagatgtgtatactcaccaggtatagcccgtctgagtctctgagagtcagaatcctgtgtttttgctaggtgtgggatgtcagcattattgatacggcgatcaaggacttctacaacaagagcatggataccatggtagaggctctcaagatgaatcttacagatggatggtctgacgacatcgtccactgggaaaattgcaagaacaaacacgcgacctgcgcgaacgactatgcgattgagagcatccattattcctgcaactacgcctacaaagatgtggagcaagacatcactctaggagatgattattttttcagtaggtacccgattgtggagaagaggttagcgcaggctggaatcagattggcgttggtacttaatcggatatttggtggaggtgaagcggatgatataccactacaagtacagtaacagctctaataaaaggaagcatagctattacaaggatttgtccattacgtcgtctatacatcaataaattggcatgaatttgtaactccattgctatacatcaataaattggcatgaatttgtaacaactgaaaggatcaagatgccacccttgaattgcacttctcaaaatttcttgaacaaaataaaatttataatcaagttcaacttttctcttctgactcccccccccccaccgccttttgcactcgaaatttcattcctatactaacatgacaattctagcaaagtaaatgtgtaaaatcaattgttcaaatataaatgtgtaaactaaagaaggtattaggaaatccttggtgttttgacgatgtatcatagagtcggcactctccactagttctcgttggagcactcatataagagcgttgctctccttcacaaggactaagtgctctctgtgagccggtttctttgccactggatgaacatgaaccactcacaaccatgcataagcttgagttggatcactcacatgctctctaggtgatcatcaaacttttgattgccaccaaaccgtctaggtgatgtcgatcaccaagagtaacaattactaactttcattgttctgaccaagtctaataaaggtggtacatgcatacaaactactattaatgcactagtgaggccactaatcatgtgattatcatcactaagtccctcactaggtaatggatattcttcactctcaaatggtttcttcaacatttgaaatgggcaagagacctcatttggctaagttggagagtataaatagccccaagcaaaagaactagtcattacaattcaacttagcaagtcgagggcacatgacatgtccaatgcataccaactccctactctagacatgtctaggggtggtaatggatcactatccaaatacttattcataatttatctaagcccttaattaattttagttcaaaaatggatagaaatagagcatgatcctacaccgagctgatctttaaattttatcatgtgaaattaagagctcattaccacccctaaacatgcctcgtgtttcctcaatggctagtttcagaaactagtcgttattgtactcttatccgataagtatagcctcgaatgcat

SEQ ID NO: 5349 - DNA, 7355 bp, Zea mays
gcggtggttctcgcctccctgtgccgcggggtgggcgactgcggttcgagtcttcaaaagccgaagagcacggggcagcgggcccatctgccaggccgccaccaccaccgccagcacccactcccttttgtcctagctcttcgcgcggtacgatcctcctcggaccacgccacaccgggagaggagagcaggaggccaccgaccggcgaccgggccccgcgtgtcacacgcagacgccaccagccaagctctccgcgggtggcggtaaaagagcgccatcacgcgggcgattacggaggggcaaaatctttttttaccgccgcgcagcatcgcagtggcagctcgtgagtggagggaggcggggatcattagtttaagagggcagattataaaagccgggctgtcgctgttgaggccgagcacagcagcagagcaccatcagcaccagcacgcccacttgcctcctattatttgcgccagagggcagggcagggcagggcaggggccttggcgctacccccgttcttatccccacctcgtgcctcccctcctccccccttcccctctctcgcccctcctccctccgtctcgtctcccaggtcatggcaaaagctggagcaccgggaaaaataacaagtgggagataaacaggaagagctaggtgagttcttcctacctgcctggacctcctacccttcccagttcttgtgtggctggtcctccttttcttcgctgatcttcttcttcccttgctgcttgtgctactggagtgtggtcgcctgattatctgatggatatgtagagtgatattttttttccccaggagatcttttttcctctctagattttttttttcagtatcctgtagcttcccgaggtggccaattcccgtttgagttccgatccttcttttcccttgctgatgttctgtcctccagcgtaatagctgcggctaaatccacgacagagttccaaggttgatgccttcgatgattttgcagctcccatccaaaaacctgagtttcttacatctctttcctcttttttttccccttctacaagtttcggttggatctcaataccacaattagtcaaaggctcagctcgttctacggttctaggaagtgtctaacagccgggtgtgatggaaacattctgttcctgcatcatcttcggaggcgcaaaatttgaccagttttcgttaggtttgatacgtgtttagtccatttagtcccttgttttcttccctttcatgtatgaccttgattccccctttcaagcacatgggtgcatgttcgctcggtccccctgtcagttcgtgcttggctggttgaaaaaaaaatgactacttatttttttttcctgaaaagctttccttccctgccctttgatctttttttagctttcccccttgtgattcaaccagagcttgtgaacatgctttcgtaaaaaaagggggaaagatgcaactttacctgcttgttccgtgaaccggcatatgagtagtttttttatggaactatttatatattctcataagttttcatgctttaattccttcttccacaagtatgtgtgatgcatatttctcacccatgctgtgtaatctgtttcttttatgtcgaaacaataagggccatgctatatttggccatgtatagtttgatcagatcaaggccctgttctgtttcaccagacacatgccaggttgctaactttggcctcccggctgttgcttcagtaggcaatcttgcctttttctgctacacgattgtctcctgtagctgtgtagatctatgatgccaaggcaaaaggccctcatgtaatcaccaaattaagatgccacagtagcgttcactggaccatctttaattaccttttttactaacacgcaatcgtgttgcacatgtttacccttgccctgcacttattgtctgtgcactgaattgctgacagtaaacacagcagctgacgtgttcgtcgtgttgcttccgcgcaggtgaatacttggagaaaaaggtcccccacaccccccacgcaggtgaatactacaagtagcagtacaaggaagagagccaatctgcccgtgactgccagtgagttgctcgggtgtggtggttagttgaggtcacgatgatgggaggcgggctgatgatggatcagagcgtggtgttccctggcgtccacaacttcgtggatctcctgcagcagaacggcgacaagaacctgggcttcgcctcactcatgccgcagacgtcctccggcgaccagtgcgtgatgggggagggtgatcttgtggacccaccgccagacagcttcccggacgccgtggaggacgacagcgatgacgacgttgaggacatcgaggagctggagcgccgcatgtggcgcgaccgcatgaagctgaagcggctcagggagctgcagcagagccgcggcaaggatcccatggctagcggtgggggcctggccgacggctcatccaagccaaggcagtcgcaggagcaggcccggcgcaagaagatgtcgcgcgcgcaggacggcatcctcaagtacatgctcaagatgatggaggtgtgccgcgcgcaggggtttgtgtacgggatcattccggagaagggcaagccggtgagcggcgcctccgacaacctccgtgcctggtggaaggagaaggtccgcttcgaccgcaacggcccggccgccatcgccaagtatcaggccgacaacgccgtcccgggcgccgagaatgagctcgcctcgggcgctgccagccctcattccttgcaggagctgcaggacaccacactcggctcgctgctctcagcactcatgcagcactgcgaccccccacagcggcgctacccgctggagaagggcgttcctccaccgtggtggcctaccggcgacgaggagtggtggccggagcttggcattcccaaggaccagggcccacccccctacaagaagccccatgaccttaagaaggcctggaaggtgagcgtgctcaccgctgtcatcaagcacatgtcaccagacatagagaagatccgtcgcctcgttcgccagtccaagtgcctccaggacaagatgactgccaaggagatctcgacctggctggcggtcgtcaagcaggaagaggagctgtacctgaagatgcaccctggcgcacgcccgccggcatccactggtggcatcgccagtgccatatctttcaacaccacctcaagcgagtacgacgtggacatcgttgatgagtgcaagggggatgaggctggcaaccagaagacagcagtcactgacccaacctccttcaaccttggtgcggctatcctaagtgacaagttcctcatgccgacgccgatgaaggaggagaccgctgacgtcgagttcatccagaagaggaacgcccccgctcctgctgagccagagctaatgctaaacaaccgggtgtacacctgcaacaacgtccagtgcccgcacagtgactacagctatggattccttgaccggaatgcccgcaacagccaccagtacacctgtaagtacaacgatccgatcactcagagcgccgagaacaagcctctgccagcaccgccgcaaccacaagccttccagccggccttcagccaagccaatcaggcagtgaacaatctggacttcagcctgcctatggacgggcagaggtccatcgccgagctgatgaacatgtacgacaccaacttcatgacgagcaagaccatgagcagtagtgacagcgtcaccatcatggagaggccgaacgcgatgccccagaggatccagatggacgagggcttcttcggacagggcaacggagtcttcgacgacgtcaatagcatgatgcagcaacaacagcagcaggcaccacccgtggtgcagcagcagcagcagcagcagttcttcatccgcgacgacacgccattcatgagccagatgggcgacatcaccagcacggcggagttcaggttcggctctggtttcaacatgtctagcaccgccgccgccgctgattacccaggcgcggcgcagaagaacgacgggaccaattggttctactgaagaataaaacttgtagggctcctcgttataagcttcggattcctccatggatctcccaagttgtcaagtcttataggtcttcgttatataggttttgcagtagctgcaagacggctggaacctggaactggtttatacttgtatgtccggccagccataaacctctcttatttgcaaacttaatgttattcctagctttaagttgttagtctcagtctgctgtccatgtatatggctgttaaaatgcttgtgcttgtttctgtactacctgctgtttggtgtctgaatgaagtgttttcttcagtggttctgctcgaaaaaaaaaaaaaaaaaacaaaaggcacatcatcgctgctgctcttcacacaaacaacatgactgacatattcaaatattttgagcgtccacatgtttgttttgattgatgcaatctctccggcgttttttctctctctctttctgttggtgtcaaattgtgaacaaaaaatgttccaacctaacatgtttggaattaccctggttctgtatctgtcgcgccttaattccaacctaaacatggacaggtgctcctgtcatatggtggaaattccgtcttaattccaccgagattgatgttgatgacacccagactacacctgtcctttatagatattttcccacggtaaaacataccctgttgcttcagttaccgtcttgttaaaagagagaccatcactagtgtctttcacatcaagatattcatccttgctttcccttaaggtccggtcaacgcgaagtggcagccctaagggaagttaggccgtccaaactccaaaccgttccaagtgctttgatgctcaagataccggatggtcctttctttgatcgcaagagccctcctttcttttatcgcttgcttggtggcactggcacctgtcatcgtccatgagaccatgacccatcctatcccttagacctcctcacatgctcgccgctggagctggatgctgtggggacgggagctcccctgctgcatcatggagatggaggggacggggatgggccggggtggggtggggcgacgcatcgctcgctggacagcaattgcgggtttttgcttccgtggtggcggatccaagcgtctgggtccgctgccagatttctgcaggcagcctgtattcagagaagccgtttcgaccccacctgcagaatttcctgaccatttcgcccagagctctgttcgttgggatcacgtccatttctgaagaggcatacgggttcttgggatggtctgcggtgaaagatgaagagttagagtctgatctaagctacactactgtgatcacgagtaatgaggccaccaaatctgggccctgccggctccaaatccttatcgagatctacctaatccgtcccctaaagaaacgcttaggtttttattttagtaagctgaaatttgcagcatggtttataattattaaaccaaacagatggctggctgatgtgacttggtacggtcaaattgcccctttgatattcgctagcggcttacggctagctctgttaacctagaacaatggctatagcgctccaactctacaccctacaacttgtttatgtgtttcattgctttttggtccagtttaccaatgatggtgataggtggggatcaagcagaggaataaactagtgctgctctctaactaaccaagtttcttaggcaaaataagccgcttaaaccacgtgcttaggcgcatgattctttaatctttatggactgcacgaacgaaagagcaggtctccatgataaattaaaatagctgaggaagcaaagcaaccctggccccaatgatttgtttggactcaactctcaactggcactaaacaaactggccaaatgggggtcaaaacaagggagagaatcggttcataaaaaaacgtgtgtgcgccatatcagtcgatggactgccggagaacggtctccgcctgggtcgtggtcatggccacgcctcgcctaacaaagcgcacgatcaactgaacccagtcatgctcatgctcatgcccagtcgacgatgtgcgtgatggcacggcgggcctgccacgctggctggacggggtggagctggctggtgaccggtgaactgaaagcgagcaccgtttcccggctaagtgcagcgtacgatggcgagaccaccgcatctggggctgttgagccggccccggtgcacagtgccgaccacgaggacagcgagaggatgggacgtggcgtcagacggcgacagtagatttcttataataacgacagaactcttatccggtgacaattgaagctctatagtggggacgaggaagtgggatggtgcgtggttgggctggccggctgggtgcctgaaagcaacagatcaatggcgacgacgacggtgggaggtggggagaggggccgccggagtggagtagcaccgcggccgggaccggaatgagatgagacctgcgtgccgcgtgcgacgagtgatccacgcgacttgagcgtccacgccgctgcgtccagcctgtttcgattcgacggcgcctcggcgcgatcgggttctggtaaagaggacctggagtggagatagacgacggagatcgcctcatccagtacgtacgcgcggatatgtcatgtcacgcaccgcgcacgccacgcgacacggggccttctcctcgccagatcagatggccgaccacaggtggccagtcctgaatgggatccccgaggcagggaggaccggaggagtcggcgtcggtctggcccacacgcgcgttgcggtggcggtttcccggctcctactgcagctgcaacttgcgagacgcactttgcgtttgggagactgtagccgcgttgcgtgcgtggtgcgcgtcggtgcgtgcggtgcgagcgccgtcgctgacgaacgggacgacatgccgccggcgccgggtgatccaagattcggggcgggggggatggatagcgaggcggacgcgggcgaccgacggacccatcgacctggctttcctggcagggcatattctgcggcgatgcctggatggccaccatgtcgccgcccctgctacaagcctagttttcacggcagctcccgctttgggtgtacgcgtcggcgtctcgcaccaccgaagtgtctcttggaagcccagaaggcctcagcgctgccacgccgcttccgttcatacgacttcgggctactatttttgtgtacggtcagatgagcaaatggtgggtccatatgtagacagagtagactgtggagagtagagacgtg

SEQ ID NO: 5350 - DNA, 1963 bp, Zea mays
gacacgaacccaacccagtcgaaccacctcgccagtgagcgcccccctcccgtcctctttccctgctggccagaactccgaatgaaatcgctgctccaccagctttctttaccttcaggaagcgagccggtagcatcaagctagatcgcggagaagctcctcgtttcccccatcggcgctgctctggcggggagaagcgtcctctcacggcggccgggaagaccaatccgcgccgccagtccctgcggcggcttccgtgaggtggtcttggctcctggggcggcgtgttcgtggtggccggcgagatgagcagccacgcggttggaacaagcaacggcggatccggggatgcggccgccgggggcgcggccaggaggaacaccaggatgcccaaatattccaagttcacacagcaggagctgcccgcttgcaagccgattcttactccaaaatgggttgtctctgttttcttaatcgttggggtcatctttgttcctattggtgttgtttcactgctagctgcaagagatgttgttgagattattgatcggtatgatgaggcatgtgtgccagtcaacatgactgagaacaagcttgcttacatccagaatgagaccatatccaaagagtgcataaggaatcttacggttacaaaggatatgaagcagcctatttttgtgtattatgaacttggtaacttctaccagaaccataggaggtatgtaaagagccgaaacgatgcacagctaagagatgctagtaaagctaaccagacatccgcttgtgaacctgagaagaccacagctaatgggcaaccaattgttccttgcggccttattgcttggagcttgtttaatgatacatataatttcactcgtggtaatgagaacttgacagtggacaagaaagatatctcctggaagagtgatagggagcataaatttggtaaagatgtctatccgagcaacttccagaatggtgcacttaaaggtggagcaacacttaacccaaagatcccgttgagtgagcaagaggacctcattgtttggatgcggaccgcagcacttccgacgttcagaaagttatatggcagactatactttgacctcaaggagaatgacacaataacagtgagattgaataacaactacaatacatatagctttggtggcaagaaaaagctggtcctctccactgcaacctggcttggggggaagaacgattttcttggctttgcataccttatagttggtgggctctgcattttcctggcatttgcattcaccttgctgtacttcgtaaaaccaaggaaactgggagaccacaactacttatcctggaacagacgctaggatgtttcggaacaccaagtgtccgtactactcgaaatgtagcttgtatgaaatgaaatgctctgaaccagaaatgtcgatgggcataagcaagcatggttcaggaaagaacttcatgtatattttttacgaaggggtctaggtggctacgttatttttgtttcttgtgttctttagtgtagcactgaacaggagaataccaattgatctctattagcttgcttcgtggtacaagcactctaaatggttgactgtggtgttgacgctttggctgccgaagaataccaattaatgatgttggttgactgtaatatcctcaagtgggaacagtaccaacttctgtacaaattgattaccgtgtgatgtttgtttctccactaccattatagtacacgggtgccgaaaaaaaaaaaaaaaagtcagaatgcctttctacgtgctataataattaaaaacataatctacaacactagagatgcatatgcgagattcgtttttattgctccacacagatggtagactggaaatcatgactagaaaacttgggattcactgcttcgtcctttattattgtgctcatgttcagattcatttccacttgctcctctact

SEQ ID NO: 5351 - DNA, 1778 bp, Zea mays
acgataggctcggtcagcccaccccagacctttccccttccgtccccggccggcgccaacgccactccagtgagccgagggcggagacggtcacggtgggcagagtgacacgccgcacgcctctccgccccgctccgctccagattgcgcgcacccacccatggcgctcgccgcttcccaccacggcttcctgcccttcgcccccgctgccacgcctaccccgtcacgggggcacctgcgcttccgcgccgcgcgccttctgccccgccccgcccggagaatttgttgccaatctatcaactcagctaatgtgttgggagcttcttcaacgacatctgatgaggcagtcccagtcccagttgtccagatagatcaggactcagaccgtgatgcgaccattgtgcagctaagttttggagatcgtttgggggcgctacttgacacgtgggcgcaaggttgaggaccctgacatgttagaaaggattcggctaaccatcatcaacaaccttctccagtaccatcctgaatcaagtgagaagttagccatgggtgaattttttgggataaaacctcctgagaagaaggcaagtgcaatactgtaaggtgccgtttggttcacatattggtaacgtaatgggtaaccaataagtcaataatgttacatcatgtttgtttaagtccaaccgtaatcatatatcacactaaaaatggataccgtccattcaaacttgttaccgctggtactcgaatgtgaatcattattattactatttatgttacatttcgtgaaccaaacaacacttaaagtgtaatgcattcccattctgtaatttcagatgctgttctgtatcgtgttatctcggtttggccatctttttaactatgatctgtgagttatcactattttaggaaatggaaatttataaacagttaggctacaaatttactttgttatgctattggtttgtgcttcgacctttgatacattattaagcctgaatttgcattctttgatttatgaactggtaggtagatgttgatattgcaacacatatagttgttgaagatgacggaccaaaaagaagcatactttacatagagaccgccgaccggcctggcctacttcttgagataatcaagatcatcgcggacacaaatattgatgtggaatcagctgagattgatactgaaggtttggttgcgaaggacaagtttcatgtaagttacagaggtggaaaactaaacagctccttatctcaggcgctgaccaattgcctgcgttattacctccgaaggcctgagacagatgaagacagctattgattgttgtgtttgtcgaaccttcctatagtgcattagaatcagaaactttggcttcagttccttcgctatgggccccttgtactgctgcaaatggagttttccattgtagctgataaagtgccgacaaggtgcatccatatgtgcataggtggcactgaatcggggctcactggaccagtttgatattgtagtaatatatatacagctgggagcaacataatttaggtttcgatcatcattatcccatttgattcctgttataagggatcacattggaaaaccctcacatgattgatgttgtctgtattctgtaagttggtgcaatccatttgcatgtaaaactcagctgcgtactgtggcgttctatgtagtggaataaataaaagagcattacgaaatcaccgagcagcttgctcctgctttccaatccggtgtgcttattgtttacagtcaaa

SEQ ID NO: 5352 - DNA, 679 bp, Zea mays
gccggccgggctcgggaagccaatcggcacaatactaggtgcgttcgtagcccggccgaatcttccagcccaaagttccatcccattgctcgctctgtccctccgttcacaacctcctccacgaccgaacgagcagagcagacccttccccctcaccagctccgggttccagcggcggcggcggcgaagatgatcataccggtgcgctgcttcacctgcggcaaggtgattgggaacaagtgggacctctacctcgacctcctccaggccgactactcggaaggggatgctctggatgctttggaattgttccgctactgctgcaggcgaatgctcatgacccatgttgacctcattgagaagttgctcaactacaacacactggagaagaccgagacaagttaagtgagcaagcatatcatgctctgaaagcactactgtttcgcagtatcatatatattgtaggcggtatgttgtttcttctctatcaggagaggattgttgtgagtgtgaacttgcttttgctctcgagcattcaaggactgacaagggcatgttgcatctatgttacgatgttggagattttaatcgatataacggctaactaaaaaaaaaaaaaaaaaagcgcccaaaagcccctcgtttgaccttttcaaaaaaaaaaaaaaaaaagcggccc

SEQ ID NO: 5353 - DNA, 2218 bp, Zea mays
  misc_feature (29)..(29): n is a, c, g, or t
gggtcgcccagcgtccgggtttaccgtgnaaacagttgacccatagtccaattatatttcagagaacgaaagcaacatgttttgcttatggccaaacaggtagtggcaagacgtacacaatgcaacctttgcctctgagagctgcacaagacatggttcgtctattgcaccaacctgtctatcggaatcagaattttaagttgtggcttagctattttgaaatatatggtgggaaactatttgatcttctatctgacagaaggcaactactgatgagggaagatggcaagaaacaagtttgcattgttggtctacaggaatttgaggtgtctgatgtacagatcgtaaaggaatatattgaaagaggaaatgcagctagaagcacagggtcaacaggggccaatgaggaatcatcaaggtcacatgctattctacaactggctgtgaagaagcatatcattgtaaaagataccaggagacagagagatcgtgatgctaatgaagctaaaaatacaaaggctgtggggaaaatatcatttattgaccttgctggaagtgagcgtggtgctgatactaccgataatgatagacaaacaaggattgagggagcagagataaataaaagtctgttagctctcaaggaatgcattcgagcacttgataatgatcagatacacattcctttcagaggaagcaagcttactgaggtccttcgtgactcatttgttggtaactctaggacagtgatgatttcttgcatttctccaaacgcaggttcatgtgaacacacactaaatacattgagatacgctgatagggtcaaaagtctttccaagggcggaaatacaagaaaagagcagtccacaggaccaactaccacttctagccgggattctttgtcagctttatcatattcattgcctgctgaagctgaagaaattcctaatcaagttcaagagaagagaccagtcgatacttataggaagggcactgaaaattttatctccaacccttctgtggagtctgaccgaaattcctttagtacgattccaaattattccaatagagggagagaagaaaatggtgcagcatctggtaatgacagggagagctatgatttgaagtccagccaacctgcttacactagtaagccacagttggttcagaattcagcaaacacacaggaggaggagaaagtcacaaaagtctcacctcctcggagaaaggcttatagagaagacaaatctgataggcagagcaactatatgaaaaaggataatggtcctgagacaagtcgggttgggtataagatgcagcaggcaaagcagctgcaacagcaacaaagaccagcatctgcttcagcctcatcaaggcaatctgaaaaggaaagttcttgtgatgatgtagaaattgatgcaattcttgaggaagaggaggccctcattgcagttcacaggaaggagatcgagaatactatggagattgtgcgggaagagatgaaccttttggcagaggttgatcaaccaggcagcctgattgacaactacgtgacacaactgagctttctgctgtcacgcaaggctgcaggtttggtaagcctccaatcacacttggcacggtttcagcaccgcctcaaagagcaagagatccttagccgcaagaaaccttccagatagtatgctcaacaatggctctggattttgcctggaaatcttattgcttggagctcaatcgcagtctattagttggttttctcctgtgcgctccagtaaatgttagacccaagcaaagcagtgatagagaggacacatgggagttgcttgagggtgtggtgatcttgatgttgaggatggtgtggtcctggttgatgtctccactttgtgtttgtcagggttgacaaccagtttggtagtagtcctttttacagtggggctgcttgggtgtttttttttggcagatgtcatgtatggcttgcccactttgcctttttttttcttttccccattttgtacgagaaactggaatgtctggaatgttgtttgcagacaccggtgggtcgatattcaccgagggggtctgtggaaaccgatacattgttgtatactagtcggttgaccgtgcgttacaacggcttacaacaatatccacgtaaactattcataaaaaatttttaagattttttaaaaaaaaaaaaaaaaaaaaaaaaaaaggccccgcc

SEQ ID NO: 5354 - DNA, 1341 bp, Zea mays
gggtcccggtccccccctcggtttttttctttgaatgaacattcaaatcttaaatttgttgataactcatgttgcagagacaagggtttacactttacagcagtgatgcggcccaaatcacaatcacataatcattattagatatttagataacatatcggttatcattatttgacaacctctaggtgcacaaagcaataaattgagatcacgaagcacaacaacaaagatacacaactgatacactacatgatctaactgagtaaacagatggcacaccgaagctacatttggtgatggcttcatttcaactttagaagaaactcgcaacttctaccttggagcaaaatcttccttgaaaagtgtcaccaacttattatgggagcaaaggcatatgacattagacctttgggtcacgcaacagcaaccggtatatctcattgttgtgctctgacatgtactcgtacccaagattgttggcatgactcttgaattcatcatagcgtggtcgcggccctggtacaccaactaatacatttgctccagcttcaccctgtgcacggtaatggaaaaggctgatgttccaacgaggactaaacgcgtccaaaaatttcataagggccccaggcctttccgggaaaatgaaccggtaaaccagttcatcttttatttctgatcttcctccaataaagtatctaaggtggtcctttgccaaatcattgtcagtaaggttaacagtcctcagtttcgcagattccatgcgatccatcattgctccaagctcattgtcagtgtagatgccaacactgtaaagaacaagggcatcttttgcattagaatcatatctgtatttgaattcagtaatattcatcctgccaaccaattctgtgaattttttgaagcttccctgctgctctggcagaaatgtagctaacactgcttcccgttttcggccaacatcagctagctcggttactattctaagtcgatcaaagttcatatttgccccactagttattgcaaccacagtttctcctttcaagttatagtatttgcagtaggcttcagccccagccaatgcaagggcaccagctggttcaaggatacttcttttctcctcaaacatatcctttattgaagcacaaatagcatctcgactgaccatctcaatgccatctactagctctctgcacaggcgaaatgtttcttccccaacagctttgacagctacaccatcagcaaacccaccagcatgctccaacatgaccctcttaccatgacacaaggataatgccattgcatttgcatctgagggttcccctccaattattcccggccgag

SEQ ID NO: 5355 - DNA, 794 bp, Zea mays
  misc_feature (2)..(2): n is a, c, g, or t
gnccgcaaatttgccattgaaatgggggattccaagccattttagggcgtttttgctaaaaccatactgacaagttatccaaggaacacaacttgataacgtaaacaccacacatggagatttccaaacttgtcccatgagcagcgacttcccagggggcgataatgaagaaaaggatgcagcagcaatgaaaagaaaactagccatgcaattctgttgcggaaatagacaactttgtgaatacaaaaggttttgctgttgcaaatacaaactaggaactctctaaagatgtagataacgcaacagcttaatcggtatcgtcaacgaccttggtccccagccctttcaagccctcggcggggatctccgcgacggtgacaagggagtagagctcctccttggcatcctcctcgtcgttcctcttgcgggcgatcctcacacgaaccctccgcggcacgctcctgatcccgctgctccagatgtgcttgttgagcttcacatcaatcctaatgtccgtggtgcccatggccttctgcgcaaacttcctgatctccttgatggcgttgggtgccttcttcttgaatgtgcagccgtggaggcgcttgtggaggttgatggtgtactccctggtgaccacctcctccttcctcgacgctcctcccttcccctgcgacatatctcctctgctccgggtgcgggtgggcggattccgctgggtagtgtggtgcggtgttgtgttccgcggcggcgcgagagcccggccggccccgaggctcccaatcgcccttaggagt

SEQ ID NO: 5356 - DNA, 7741 bp, Zea mays
  misc_feature (1640)..(1640): n is a, c, g, or t
ttttttgtttgcagattgatgtcttataactgcttcagcaacatcttctagagatctctggatactagatgggatctgatagtgatgagcaggagggtcaatattcttcttttcgttagtcgaaatggaactgcgacctgactcaatcgacctcctggttctgaaaacttacattagcagatatgtttccatggatatcgtcaagacctttttgatctcttttgactgcatgctccagctcatcagctcaacccttcgtgtcgagcagggatctctcaccggcgagaccgcttcggttaacaagaccagccacaagttcgagttggaggacactaacatttaacaagaccagccacaagattgagttgttttagttaaattgtttttctactgcgaaattatcttgcatgtagctttggagcaggtaatgcatatccgcaaaaggttaataacaatttattcaacaaaagaaaaaaatgataaaagaactagtagctacttgcctactttcagtgacctctctataattaaaaagattgactgttctacttctgacaactctttcatcaaggtacctgaaattgttgaatttacattctcgtgtgactgttctacttctggcaggttttggttgagaaaatggtggcaggttctgtaataattagtattttttatttatatttttagggtgctgtcagtggaggaacaatgctgccaagagagtagcaactctggaatttgatcgcacccgaaagtcaatgggagttattgtgaaagtggactctgggaagaacttgctgcttgtcaaggtatgcattgtgctggagtttgcattccttgtggttttaggtcgtcagtttcaagtgcacagcaatgacctgcttcttgctgctcatctgtttaagctgtgatgttgtccagcctgtcgcccgccgtgctacccacattcagttgctcgatggatctgttgtgctattggatgatggtgccaaggcactcatattatctacactccgtgagatgtctaccagtgctttgcgctgtttgggttttgcctacaaggatgaattggcagaatttgcaacatatgatggtgaagatcatgcagctcacaagtatctgctcgatccatcatactactcttccatagagagtaatatgatcttttgtggttttgtgggtctaagggatcctccaagagaagaagtccacacagcaattgaagattgcagagctgctggaatacgtgttatggtgataacaggagataacaaagaaacagccgaggccatctgccatgagattggggtttttggccctcatgaagacatcagttcaaaaagcttcacagggaaggaattcatggcactttctgataaaaagaagctcttaagacaacagtgcggccttctcttctccagggcagaaccaaaacataagcaggagatagttagactgctcaaagaagatggtgaagtggttgcaatgactggcgatggggtgaatgatgcaccagctcttaaactggccgatattggagttgcaatgggcattacagggactgaggttgctaaagaagcttcagatatggtacgttttgttagaagtgcctgacgccatgtcctatgaacttgtgtcangttgctaaagaagcttcagatatggtacttgcagatgataacttcagtactatagtcgcagcagttggtgaagggaggtctatttacaacaacatgaaggcttttattaggtctgtttttggataagctatggccaaacttttttgtgcataattgttggttaaattaaaatatgctgagtcatgtgctatatgaactgcagatatatgatctcctcaaacatcggagaagtcgcgtccatattcttgacatcggctttgggtattccagaaggtctcatcccagtgcaacttctatgggtcaatcttgttacggatggccctccagcgacagctttagggttcaacccacctgataaagacatcatgaagaaacctcctcggagaagtgatgactcgttgatcacgccttggatcctgtttcgctatatggtatgttttcaatcacgccttggatcctgtttcgctatatggtatgttttccagttgatcatttgattagttgatgggtttgagattaatatgatacggtggactcttgtttttccagttcaatgaagctgtgtagcaatgtacatgcttttgatcaagtatgtctattaaattgttttacggtgaatagtttgtagtgtaaacctgcaagggttttcatagtgtaactaagttccatggagatcttgagcccccagtagatgaaaacggccacgaatttaccaaagtattcttggatgtgctactaattcagggttgagcttgacttctgataaattaatgatgtgaacaacattggggtttaaacatccaccacttagatatgatttatctgtcgttgttgcctgaaagtgactagtaacaagaagagacataaaatgcagcatcagacttgcatgttcgaataaatatgtcaaattatatgtggagtagatgtatttgctctgatcttgctgatctgcagctgaagtgaaaaggtgtatagctgataagaaatgaagcatgaatgggttatagaaaattatattttatgtaaatctattacatagccttgtggatattggtaccaccttatttttcttgttggcctgttcaaccacatgaaacacgctttgctactttttttttactaaccagagatccatgtccatgcatgtgtaggttattggcctttatgttggggttgcgacagtgggaatcttcatcatctggtacacgcatggcagtttcctgggaattgacctggctagtgatggccatacccttgtgtcgtactcccagctctcaaactgggggcagtgctcctcatgggagggcttcaaggtgtcgccattcactgcaggagcgaggacattcagctttgatgcaaatccatgcgattacttccagggtggcaagattaaagcaacgaccctctctttgtctgtcttggtggcaattgagatgttcaactcactgaatgccctgtcagaggatggcagcctcctgagcatgccgccatgggttaatccatggcttcttctggccatgtccgtttcttttgggctgcatttcttgatcctctacgtgcctttcctggctcaagtgtttgggattgtgcccctcagtttgaacgaatggctcttggtgatagcagtggccttaccagtggtgctgatcgatgaggttctcaaatttgtggggcggtgcctgacagctcgtgcccgaaaacaatcagggaagaggaaggcagagtagatgctagtgatcatcggtattagaatctgtagcgccacgggaatcgatattggatgtgacaccccattgtttttgagttgctaaggtctttcgatcctttctgagtctttttagactgggaatatgacagtccaggacaggcaaggatattctataggactcataatcagatcgcattgaacacactgcattcttttcgttgtaacaaatgctggtgctgtgaacatgctggagatacagcaatggctatctgacgctttttagctatgatggtgcgctatatatgctactactgttctgttgcgaatcttctgacatgttgctcactgctcagtaatatatttgttagagtcgtatgttcagttatgtttgcttgtgagattcctcttgtgcagatgaaatccgcagcatggctattgatcatatactgctgtacacggaggatgcaacattattttagcttcacctgccctcctcgctgttgaccatctttgaaaaaactctcctcatggacataccatcgaggtcccccaagttcgctgccacggtggcctctgtcccgtcgctgacggtagactggttgcgatggaatttggacgtactcctgggaactagctgcgtgttgtctgtgccagagctgtccggcgacgcctcctgcaactgcagcgcgaactcgaggcaccagagcacgtcccctatggcgggccgctccacgccgtactccgcgaggcacttctccgcggtgtcgacgaacttcttgagcgactccggccgtatcgacccagcgatccgctggtcgacgatgctgtcgagctcgccgtttttgagccgctgcgtggcccactctgccaggttgaccatctcccggggcagcgtcgggtcgatgaccggacgggcgcagagcacctccagcaggacgacgccgaaggagtagacgtcggacttgttcgtcagcatctgccgccggaagtactccgggtcgaggtacccgaagctgcccttgacggcggtgctgacgtgcgtcttgtccagctccggcccggtcttggacagcccaaagtcggcgaccttggccatgaagctgtcgtcgaggaggatgttggcggacttgacgtcacggtggatgatcgccttggccgagccggtgtggaggtagtgcaggcccctggcggcgccgatgcacacgtcgagcctctgcttccacgagaggggaggcagctcggagtcgtagaggtggctccggagcgtgcccctggccatgtactcgtacaccaggatcatctcgccgcgctcgtcgcagtagccgatgagcgacaccaggtggcggtgccgcagccgggagagcagctcgatctccgtgcggaactcgttcagcccctgctgcgaccgccggttgccgcgcttcacggccacctgcgtctcgtccctcagcgtgcccttgtacaccttcccgaacccgcccacgccgatcaccatgccctcgtcgaacccgcacgtcgcctcctgcagcgccgcctgggggggcccctacccggcaccggcgctctgcccgagcgtgaccgtgttgttcctggcgcctgcgctgctgctcttgccgaagctgcgcgagtgcgaccgggatcccagcgcgctctccgagaacgcgacccaggtgctcgacggcttcttctctggcttcttccttcgtcgtcgcaacatgaggacaatgagcgcgacagccatcaccacggtgatgacccccgcgatggccgaaccagcgatgattgcggtgacggtcttcttctttgaaccgctctgcgacgagtccgcgccgccgccggtgctcccgaccattctcatgatctcgaggccgttgaggacgccgtctgggtacgcgttgcccagcgtggacgtcccgatgctcacggtgatgttgcccttggcgtccttggcgctgagcacgaagtccttgtataacggcacggccgggacgctgaaagtgtctctggagatctcgtagtccggcagcacattccacccgcctacgtagacgttgaagaccaacccgttcgccgccttgctgacgatgtcgcagaagtgtagccggagcaggtacgccgaccccggcgcggcctggagcttccacgtcatgttaaactgcacgcttatggtgctggcggacaccaggttggtgttgatctccgtcgctgtagcgtagaccatgcctggcgccgtctcgggcgtcgccaagcctggcgtccaccggagcttcgacggcgccacatccctgtgcaccgtgaccgaactgtcgaccaggaaggcttcgtcgggaagccacgtccttcccagcgtgtcgttcctgggcgtgatcttgggagagcccatgttgaccctgttaaccgtctcgagcgcctgcgtggacagccccgcgtagcggcccatggggctcaccgtctgcgccgtgtccgcgaacaggtcgtcggggtgcgacacgacctcgatggcgttgacgaacgccaccttccccgccgccgccggcgcgaacgcgaccgccagcgtgccgccggcgacgttgacggagaactcccggaccgcgggcgtgccgttggcgggcgcgtacccgtcgatgagcagcaggccctgcgcggacacgctgaactcggcgtccgcggcgaggtcgccggacccgtaccggaaggggaagaagtggaggcgcacgaagtggcgcccgggactcttgatcgcgaacgtgtacgaggacggcgccgcgaagacgcgcgcggaccggtacagcgccgcgtcgtcggagccgctggccgccgacgcgctggcctcggagccccggggcgccggcagcacggccgccgcggggaggccgtcgtccccgaggaacgtcctgccgtcgacggtggcgttcgccgccgtgccgcagagcacgaggtagtcgtccgccggggtgaacgcggcggccaccagcgcgggcagcagcagcagcacgacggcgacccgcaggagcgtgtcgaggacggcgcgagccatggacgtggcggaagggagtggctctagaagcagctcatggacctgtccctggaagtggaacagagacgtcgagggttgcagttgcaggcagcatgaatcaaggccccatgggagtcatggtggatggttggttacttagcacaggacaggagctgctgctgtttggcggcgtgctgagagtgaatctgcgaactggcaggacaggggcagcagctagtaggtaccctaagagctgcctacccacaggaacgcggaaccggtgctcggtgattggagatttggttagccatggaggtaatattggggagggaggtggtggagcttttggttagtggggaaagcatatcactgtcattttccgaggatctgagctagaggatggctttagatattttaccaggaccaggagcctttttttttaattctgccattttttcgtggtttacaggtccctcggccgcttgtgcgcttgctcacgtcgacctcagcgaatttcaattcagcagctacaaaatggcaggtgaaaacgaggcatcgagaagagcatacatacacatgccttttcagggaccaaggaattctcgtttctgcggcagaacgacggcaaattattatttctatctctaggcctggctggtggctggtggctggtggtggactggtggtggtgctctgctttcgcagctcgcgaggtggtggtgggaaggaccgcggaagcctccagcggcccgcgtcgtccgccccgcgcaacccgaccagtcgtcaccagagtgcagtgggcatggcaggcggtcgtcgttgtcgtgcgccccaccaccagacgagatcatacgctagctgccggtgcagggtgcacacgtttcaggttcgttagatccgtactagtagatggcaccgatggaattggggattgattggcacactggatcggactcggaaccgtatatccattaaaatttgagggaaatagctagtggctgcaccgcgatactttctctgtccctcacagacacaagtctgtctgatgactgatgtagcatacgcgggcggatggcagacgaggctgctggcgtgtttcgcgtgcgcgcgggggggaggagaaacagaaaccggcgtgtggactggacacacgacgacacaagggccgggaaacatggaggataaagcgcggcggaaggaggcgtgaacgccgccagccaccagtacgcgtcgcgtcgcgtcggtgccgcgagagggacacggcacggggcaccgtctcgccctaggaggccctacgcccacgcgagttgaccggcgatgcatggatggcgaagactgtcggggtgtgcagctggatgcaggggcgcgagcggaacg

SEQ ID NO: 5357 - DNA, 1850 bp, Zea mays
ccgcccggcccccgcggctccagcacagccgccaccttcccccttatactcgccggaggccaaccagtactcgtgccacccctcctcttccttgtgatctccgaatacccatctcagattccaagggccgcgccgtgtaatccccggctctccccacccaccatatatcctagtatccgcgcctcaaatccctcgcgaaacgccccgccgttagcagttgttgtctgccgtgatttgagccgggcggacggattgatcccgggacgaggtgtctcagcttttgatcttgatcctgatcctgggaggcgttcctggtttattggtgggagcgaagaagccatgataccttccgtgaggctctctcctggtcctgcagccttctcaggctccagcctacgctcaaaattaccgtcaattccatccatctccagtctcaaaccctccaaatatgtggtctcctcgctgaaaccactctacctagcaccgctagatggtccgcgcactgccgagcttaagtctcggagacagccacttgagttccgttgttctgcttctgctgctgatgacaaggagtcaaagactcaggtggtgccagttcagtcggaaggcgcacagaggttgaagatctccatctatttcgccacctggtgggcgcttaatgtgatatttaacatttacaacaagaaggttctcaatgcattcccttacccctggctcacctccacactctccctcgcctgcggctctgctatgatgcttttctcatgggccaccggtcttgttgaggcccctaagaccgacctggacttctggaaagttcttttcccggttgctgtggcgcatacaattggccatgttgctgctacagtgagcatgtctaaggtggcagtgtcattcacacacataattaaaagcgcagaacctgcattcagtgttttggtgtcaaggttcttccttggggagacgtttccaattccagtatatctttctcttcttccaatcattggtggttgtgctctagctgctgtcacagagctgaactttaatatggttggatttatgggtgctatgatgtccaaccttgcatttgttttccgcaacatcttctcgaagaggggcatgaaggggaagtccgtcagtggcatgaattactatgcttgcctgtcaataatgtcgctggtcatactgactccatttgctatagctatggaaggtcctcagatgtgggctgctggttggcaaaaggctgttgcagaagttggacccaatgttgtctggtggatcgctgcacagagcgtgttctatcacttatataaccaggtgtcctacatgtctctcgatcagatctctccattgacgtttagcattggcaatacaatgaaacgtatatcagtgattgtttcatctataattatcttccacacgcctgtccgccctgtcaatgcactgggagctgccattgccatccttggcacattcctgtactctcaggcaaaggcgtgaggctaaagctttggccaaaggatcggagccagtagcaggcactggatccagttttgcttgttggagtggcatgtagatataaggttcggttttcgtgagagagagggtaataatggatcagtggctctgctgttccgttcttgtttgttgaccagattgaaatgcacaggccgtgacatgaaccgtcgtcaagtgtacctgaataacaccgtaacgaaattcaccgatgctgtttctttatgggtatgtaatccaaaccggaatcctggtttcaatagaaatagtttctgctatcaaaaaaaaaaaaaaaaaaaaaaaaaaaaaaactcgagggggggcccggtacc

SEQ ID NO: 5358 - DNA, 1343 bp, Zea mays
cattgcattgggtacctccgggccggccgggatccacaagaggagaagaaacaatcaaccagcaacactcttctcttataacatagtacagcgaaggtaactcacatggcaacttccatgggttgtctcgtcttgctctgccttgtttcttctctccttcccagtgccgtccttggccacccatggggtggcttgttcccacagttctatgaccattcgtgccccaaggcgaaggagattgtgcagtccattgtggcacaggctgtggccaaggagaccaggatggcggcatctttagtcagactgcatttccatgactgctttgtcaagggctgcgatgcttcggtgctgttggacaacagcagcagcatagttagtgagaaagggtccaacccgaacaggaactccctcagggggtttgaggtgatcgaccagattaaggctgctcttgaggctgcctgcccaggcacagtctcctgtgccgacattgttgcccttgcggctcgtgattccaccgccctggttggtggaccatactgggacgtgccacttggccggagagactcgctcggtgcaagcatccagggctccaacaatgacatcccagcccccaacaacacactccccactatcatcaccaagttcaagcgccagggcctcaatgttgttgatgttgtcgccctctcaggtggtcacaccattggtatgtctcggtgcactagtttccggcagaggctatacaaccagacaggcaatggcatggctgacagcacactggatgtatcctacgccgcaaagctgaggcagggatgcccccgctctggtggtgacaacaacctcttccccttggacttcatcacccctgccaagtttgacaatttttactacaagaacctcctggccggcaagggccttctaagctctgatgagattctgttaaccaagagcgctgagacagcggccctcgtgaaggcatatgctgctgatgtcaatctcttcttccagcactttgcacagtctatggtgaatatgggaaacatctcgccactgacagggtcacaaggtgagatcaggaagaactgcaggaggctcaacaatgaccactgagggcactgaagtcgcttgatgtgctgaattgttcgtgatgttggtggcgtattttgtttaaataagtaagcatggctgtgattttatcatatgatcgatctttggggttttatttaacacattgtaaaatgtgtatctattaataactcaatgtataagatgtgttcattcttcggttgccaaaaaaaaaaaaaaaaaaacagacaaaaaataaccggacggagccccttgcggcc

SEQ ID NO: 5359 - DNA, 2414 bp, Zea mays
taccatttttacacctgttttggcgaggggggggggcacaggcacagttgtttctgcttccctcattcataaactttatggaaattcgttcgcgccggttcttgagcatgctgagcgtcttacggaggatgtggtttctgtatttccggcagctgatgctttggagcaatacataatggcggggagggcctccgttacgggagatgatggtttggatagcctatgcagacataaactagttccatatcagattgaaagtaaatctggtacattagttttacgctgggtaaatgggcaacttgagagaattgaaacttgggttaaaagggctgctgaccaagaggtttgggaccctatatcccctcaacaacgccatgggaattctattgtagaagtctatagaatcatagaagagactgcagatcaattttttgcatttaaggttcctatgcgagatggagaattaaatagtctatgccgtggtcttgacaaggcattccaagtttatacacagctggttactgcacccctagttgataaagaagatttagctccgcctattcctgttcttactcgatataaaaaggagcttggaatcaaggcttttgtaaaaaaagaggtccaagaagttagaacagttgatgagaggaaagctagcgaaattactcagcttacaatgccaaagctttgtgttcgtcttaacagtctatattacggtatcagccagttgagtaagttggaggacagcattaatgagaggtgggctcggaagaaaagtgaaaacactaacatcagacgaaaaagtgaaaagtcaaagagtgccgtccctaatcagaagaatcaatttgatggcagcagaaaagaaatcaatactgctattgatcgtctctgtgaatttactgggacaaaggttatattctgggacctgcagcagccatttgttgagaatttatacagaaatggtgttgctcaagctcgattggacaccataactgaagtgcttgatttggtccttaatcaactttgtgatgtcattgtggaacaactgagggatcgtgtggttacagggcttctgcaagcatgcctggatggcttccttcgtgtgatactggatggaggttctactcgtgtcttctctccaaatgatgcagctttattggaggaagatcttgaaaccctgaaggaattttttgtttctggtggagatggactgcctcgtggaactgttgaaaacttggtctcgcgtgtacgtcctgtaataaatctgatcaagcaagagacccgcgtgctcattgatgacctacgagaagttactcaaggtggcaagagcaaatttggagcggactccaaaaccctccttagggtcctgtgtcacagaaatgattcagaggcatcacattacgtgaagaagcaattcaagatacccagctcagctccgagcgcctgattgattgcgaacgaaaaaacagatatcgaacaggacactgcagccttgctcgtaacccaagaaacggtgctccaccgcccattttcatgtttgtgtaacagttattgttcatcggtaacactaggactttgggtggacgcggcagtaagcatgtatttacacaaatactaacacactggtcctgtattgattggtactagttttggaccattggagtttccccatttagggctagtttgggaacctcatttcccaaaggatttctgtttttttaaaggagaataaactaatttcttttggaaaaatggggttcccaaactaacccttagattcctgacttttttaaaccaaaactttagtatggcaatgtttggtagccagcagccatccaagcaggctccaagacttggggttcaaatacataaatactcttatctttgacctgcaagccccgaacacttgtctttggaggaaagcgccaagaagtgaatatcctatcctatcactatgcgcaagtgtgtgcaatgatatacaagcatacatacaggcatacaagtataggaaatagtgagcgcggtcaattatatactcctagttttctcgatgaccatagcccatagcatgacccgagacctttacacaattatttattgcaacacatcatcagtccatcatgaagtgattaaagtacgtatggggccacacactcatcttggatgcccatcttcaacctcccgtgcagtcatgcacacaattagcttccccatcccctagtactagtaggagtaggcatgcaatgcaaagtgccgaaaggcagagcgcaaaaactgcacaaggctacaagcaaagcgcacgccctctcatcatctcattcccatggcgacttgtataaacaacaactaccctagtagcaaatagcagtactaaaatcaccacgcatttccatccctcctgtaccgcagaaaag

SEQ ID NO: 5360 - DNA, 2893 bp, Zea mays
ttgggacctcgaggcgccgcgaggccggccgctgttcccgtcgaccggattcggttcggaccgcagctccccacactcgtccgtccgcccgtcgaatggcggctcccaaaccctaagccacagatcccttcccctgcctcagcttcgaacgccctcgcctcgccgccggtctttgtgtactgccgctgtgtccgtcggcgcggatcaagggtccgctccgctgcaccccgcggggagaaaggggcgggcctcggcgtcctccgctcgtcgcccgagtgtctgagtactatcaggtgcaagtccagccgaactgattgcatgacatatgaaatagcgagcgtcgaatgaccttctctatggatatggatttgaacgcatcaccggtgcctgacgatgatgagcagcagccttacaatgaaccagtggaggctgagtatgctcaggaggaacatgttgaatctgctgtcgcaacattgcgccgggaacgtgaagaaagacgcaagagactaaagagagagcagcaggatgatgggtcaaggctacattcccagcagattagggttgattatgctcctcaacccaaaaggcatagtcgcatcaaagaggcacctcagggctggttggactgtcctgcatttggggagccaatagataaaatcataccatctaaagttcctctcgatgaaacattcaatgagtcagtgcctcctgggaagcgatactcctcaaagcaactagttaacaaacaaagaaaagctggtcgtgaaataggtctggtgattgatttgacaaataccaccaggtattattcaccagctgaatggacgaagcaaggtactaagtatgcgaagattgcatgcaaggggagagatgcggtacctgacaatgaatctgttaataagtttgtctatgaggcaatgatattccttgatcgacaaaaacattcaaagaatcctaaatatattctggttcactgtacccatggtcataatcgtaccggtttcatgattattcattaccttatgcgcacacacgtatcttgtgttgctgaggcgataaatatgtttgctcaaaggcggccacctggcatatacaagagggactatattgaagcactatattcattttaccatgaggtccctgagaatatgatgatagcatgccctccaacaccagaatggaagagaccagatgatctcgatttaaatggcgaagctaagcaggatgatgacgacgacaatggtgatccagaaccaccgcgtaatgaatcagaggataaaatcatcaccaacgacgatgtgttaggggacgaagtgccatatgaccagcaagaagctttgcgtgtgctatgttataagttgcttgaaatgccccttataaggggacattcacaatttcctggatcacatccagtttctcttaacagtgaaaatctgcaactacttagacagcgatactactatgctacatggaaagctgacggaacacgatatatgatgcttataatgagagatggttgtttcttgattgatcgaaatttttgctttagaagggttcagatgcgctttccccataagagccttgaaggtctgcatgatatgaccttgattgatggagagatgattatagacacggtaccagattcaggcttgaagagaaggtacttggcatatgatcttatggcacttggtgcagtgtccaaaactaagttgccgttttctgaaaggtggaaaatgctggaagatgaaataatacgaccacgttattatgagaaaaataaatttgagagtggttctaagagcaatccgttgtacaaatatgacatggaattattttcggttagaagaaaagatttttggctgctctcaacagtaaaaaaggttcttaaggtgttcattccatccctttgccatgatgctgatggccttatatttcagggctgggacgatccatatgtaactcgtactcatgaaggtctcctgaagtggaaataccctgagatgaattctgtggactttctgttcgagcttacgaatgataatcgtcaactggttttcctttatgagagaggaaaaaagaaactcatggatggtgcccggatagcatttactgacgatgtagatccatcctctatcgccgggaggattgttgaatgctcctggaataaggaagaacagtgttggtcctgtatgcgtattagatctgataaatctactccaaacgacatcaacacataccggaaggtgatgaggagtatcacagataacattaccgaggaaaagcttctcgaagagattgatgagataagtcttctcccgatgtatgctgataggatgcagcaggctcatacaaagatggcacaacaacagcggcggagattgccaccacagtgctagccagtgctggggcgctctcctaccgccctagccagctgctggcttccgtagctgtgtaattagtagaggtttcagtagccccatatgatgatggctggctgggtctggcctgccaactaattctttgcacctcatttgtgtcttctccctgccctcccacccacctgtataggcgtcgccgcagagtagtttccctgtaaattgtgtactctatgttctcccatattctcccctatggttttatttttcatgggtgtagaatagcgtttaacaagagggtggtcttctaggtacattagtgtacgcgttactatctctcggtgttgcggttgccttgtgctagaataaatatggttaccatctgttgctgatgggtcatgtggttcccccggcggatatcatgtggttgcgtggtatgggttattttcgtcttctgttttgttcgcacctgatccgatccgatcttttgttcaatgaagaagaaaaaaattattggt

SEQ ID NO: 5361 - DNA, 2541 bp, Zea mays
ttgggggcccccgcggccccccggctccttctcagtataaactcatccgcaccacctcccccgggcccgcccgccgctcctgcctcgcctcaccaccattagagcgcgcgcgccaagctcgtggtgaggttttcgagatgaaggttatcgagaagatcctggaggcggcgggggatggccggacggcgttctcgttcgagtacttccctcccaagacggaggagggggtcgagaacctgttcgagcggatggaccgcatggtggcgcacggcccctccttctgcgacatcacctggggcgccgggggatccaccgctgaccttaccctcgaaatcgccaaccgtatgcagaacatggtgtgtgtggaaaccatgatgcacctgacatgtacaaacatgccagtagagaagattgaccatgccttggaaaccatcaaatccaatgggattcaaaatgttttggccctcagaggggatcctccacatgggcaagacaaatttgtgcaagttgaaggcggatttgcttgtgctcttgatttggtgcagcatattagagccaagtacggtgattattttggcataactgtagctggttatccagaggcacaccctgatgcgatacaaggcgagggaggtgctacattggaagcatatagcaatgatcttgcgtacttgaagagaaaggttgatgctggtgctgaccttattgttacacaacttttctatgataccgacatctttctcaagtttgtgaatgactgccgccaaattggtattacttgtcccattgttcctggcataatgccaataaataactacaaaggtttcctgcgcatgactgggttctgcaaaactaagataccttctgagatcactgctgcactagatcctatcaaagacaatgaggaggctgttagacaatatggaatccaccttggaactgagatgtgcaagaaaattcttgctactggcattaagactttgcacctttacacactaaacatggacaagtctgctataggaattttgatgaatcttggattaattgaggagtccaaggtttcaaggccattaccttggaggccagcgactaatgttttccgtgttaaagaggatgttcgacctatattctgggccaacagaccaaagagctatcttaaaaggacattaggttgggatcagtatccccatggacggtggggtgattctcggaacccatcatatggagcacttactgaccaccagttcacaagaccacgaggccgtggtaagaagctccaagaggaatgggctgttccactgaaatctgtggaggacattagtgagcgcttcacaaacttctgtcaagggaaactcacaagcagcccatggtcagaattggacggtcttcaaccagagacaaagattatcgatgaccagttggtgaatattaaccagaagggtttccttacaattaacagccaacctgctgtaaatggagagaaatccgactcgcctactgttggttggggtggtcctggaggctacgtttatcagaaggcctacctcgaattcttctgcgcaaaggagaagttggaccaactaattgagaagatcaaagcattcccttctctcacttacattgctgtgaacaaggatggagaaacattctccaatatttcaccgaacgccgtgaatgctgtcacgtggggtgttttccctggcaaggagattatccagcctacggttgtggatcatgcaagttttatggtttggaaggacgaagcatttgaaatctggactcgggggtggggttgcatgttccctgagggtgattcatcgagggagctactagagaaggttcagaagacctactacctggtcagcctcgttgacaacgactacgtccagggggacctgtttgctgccttcaagatctgattatgctctcatggtctgtattgttgtatggttggacccaacaatattcttgcatccccgactacaggtctgatcgccatgaaagcttctgttcatttgagctcgggggagtccgctagtcttatttttcttgatttctcttggctttctggaaccatacgaatcaataagaaatgagctgtgttcactttccagttcctccgtgcaagtggcgcaacggccaggttctagatgtaaaattcgtcctctaatacagaggttggtattgtatgttagtgtaggatgcgctgctcgcattgcactgttattgtgcttctgtttggtggaaataaagattggtcgaaatctgagggccagattgaaagccaaaaaaaaaaaaaaaaaaaaaaaaaaaaatattattctttgattaattttaaataagaaggagaatctagcccctccggtttctcgctcccaatctagtcctgaatgttcacaagcccccatttgaatttagccgggtaaccccattaattaggaggtctattgaggcgtttttatgggtatgtgaaaagattaggagactctagacgactctatataaaggcagccctcctttgggtcaaagaataattttctg

SEQ ID NO: 5362 - DNA, 2059 bp, Zea mays
cctcgaggccggccgggccggggcttcgcagccagtggctcagcggctgcgcccgtgcctgtcacgtcttgtcctcaatctctctctctctctctctctctctctctctcaatcctcacctctccggctctctttctcctccccagtccccaacggtgaggcccccgccgcgcagcccatcgacgcattgccgctgcaagcgcggacaccgagggctagaagcggcggcggtgccagggttcggcgctcggtcggcaatggcgaggcggcttatgctggcgctccctgtgctcctcttcttattgctcgtcgggcaatgccacggcggcaagattggcgtctgctacggccgcaacgccgacgaccttccggcgccagacaaggtggcgcagctaatccagcagcagtccatcaagtacgtgcgcatctacgacaccaacatcgacgtcatcaaggcattcgccaacaccggcgtcgagctcatggtcggcgtccccaactccgacctcctcgccttcgcgcagtaccagtccaacgtcgacacatggctcaagaacagcatcctcccatactacccggacaccatgatcacctacatcaccgtcggcgccgaggtcaccgagagccccgccaacgtctccgccctcgtcgtgccagccatgcgcaatgtgcacaccgcgctcaagaaggccggcctgcacaagaagatcaccatctccagcacccactcgctcgggatactgtcccggtcgttcccgccgtctgctggggcgttcaacagcagctacgcctacttcttgaagcctatgctccagttccttgtggagaatcaggcaccgttcatggtggatttgtacccctactatgcgtaccagaactcgcggagcaatgtgtccctcaactacgcgctgttctcgccagagtcccaggatgtgattgacccaaacactggactggtttacactaacatgttcgacgcccaggtcgattccatcttctttgcgctcatggctctgaacttcaagactttgaagatcatgatcactgagtcagggtggccaaacaaaggggcggtcaaggagactggagccacaccagacaatgctcagacctacaataccaatttgatacgccatgttgttaatgacagcggcacaccggcgaaaccaggggaagagattgatgtctacatattttcattgttcaatgagaacaggaaacctggcatcgagtcggagaggaactggggactgttttttcctgataagagctctatctacagccttgattggacgggccgaggcaatgtggatgttatgactggagcaaacattacaagtgctaatggtacctggtgtattgcttcaactaatgcatcagaaactgatctgcagaatgccctcaactgggcatgtggtccaggcaacgtagattgttctgccatacagccaagccaaccctgctaccagccggacactttaacttcccatgcttcatatgcattcaatagctactaccagcaaaatggagccaacgttgtggcctgtgactttggaggtgcggggatacgaacgacaaaagatccaagttatgacacttgcgtctatttggctgccggcaataagatgagcacgacgaactcaacatctcttccagctcgcagcgactctggtccagtcccacgcgtcaaatgcttcgccactttgctgcccatgctggccctcgtgatggctgcagttatgctgtgatctatggggaaaaaatgctccagctagcctccttaagacgtgagatgaaaggtgaattgcgtaatgctgctggtaaccatcgaagttctgttttttgccatgagcagtagactagtagtagtctagtagagaggcaccttatgctgtaggaattctctggtcggttaagatgtacatcgtcgcgcggacaatatatatcagctggcattaagaacttgatatcgtattatgctgtgtttcggctctcaaaaaaaaaaaaaaaaaaaaaaagaaaagcaccggcccagggcggcacgctcgcacacacaaaa

SEQ ID NO: 5363 - DNA, 1625 bp, Zea mays
ccggccggacaagagagaagtcggcccgcgcggccggcgcgcagaagctactcccgaagagtcgctctcctgcgtccacgcctcgcttgcggcgactagggcgactgccgccgccgcccttcgcccagctgcccaggtcttcgtcgggcgctttaccgctgaagagcgcccaccataccagattggccaccagaggattgctacatttgggaaggatgagcaaaggccctgttccattcgccaacattgggaagagagcaaaagatctcttgtacaaggactacaactttgatcaaaagttttttttgtcgacatgttctaactctggtttgaatctcacagccactggtgtgaagatcaatgaagacttcattggtgatatacggacacagcataaaagcagcagaaccactgttgatgtcataatcgatagtgattctaaagtgtcaaccacagtcactgttgatgaagcactaactggtttgaagacttcatttgccttcaaggttccagatcacaagtctgggaagcttgatctgcaatatgcccacaatcgtttttcaatgaattcgaccattggtttgacatcaacacctttggttgagctcgctgcaactgtcggcacaagtgaacttgccattggtgctgagttcgggtttgatagtacttcagctgctgttaccaaatacaactcaggggttggatacaacaagtctgatttctctgcttccttgctacttgctgataaaggggagactttgaaggcatcttacgttcatttattcaatccgaccaacggggctacagttgcagctgaggtaacacacaagctgaaaaccaaggagaactatttcacacttgggagctcccatgcacttgatccttcaacattgctaaagacgagattcagcaactcggggaaggtcggtctgctctgtcagcatgagtggaggccaaagtccctcgtgactctttcagctgagtatgatccaaaggtggtaagtgcgccttcaaggatcggcgtggccatatcgctcaagccttgagatatgggtcaagtcaccttctgtaaaacagtacaagcgttacgtactgatactcgtgtccaagaacataaacttttggagcgatgcctagaacaaccctctcccttttagccttgtttttggtaagagccttgggcaaagaagtgttgtcagggagttggacttgttttgtggaatgtttccattaagagccaaccccacaccgatgattgcaaacagaggtttgtattagtgcagaagtttcactctgcgatattttttccccatgttttcctagtcgacgcaaaatgattttggaggtgattgaacacctaacgtcttgagttgacggcagctttaacagctctgattataaaggggccacttgtacccagcaacagaagaatttgctcccaattcgtcgaattggctattctggtggaacattttttgtcaaactcgggggggggcccgggaccctcatgtattcagagcagtctagttttgcttcctcgataaagtatgttgtgttggatatttgtgatgtgaggtgaatgcgcccaggctggagatcagccgatggaggcttatcgagcaggg

SEQ ID NO: 5364 - DNA, 1906 bp, Zea mays
cccacgcgtccgcccgcctgccctgacagcaggagccgcctccagtatcccccgtcaatgcttgcgaggacagaagacacctgacctgatctgaccaggcagatcgagtggcttgccgtcgcgtgcaaccgcaaccgccgctggtattatatagagacccctattacatcggtcgcgccgcgctgtggcgctaatagtcgtcgatcgttccatcgaccggcggccggccagcctagctcttggctcttgctccgatcggatcgagcgccggacaaggcaaggcagccgtacgtacgacgatggcgcagggcagccgcagcgctgccgtgcccgccgcagcgtccttcttcgcccttctcgccgtggcggccccgctgctcctgtgctgcgcgccggccgccgcggagctggccaggctggagcacccgcccaaggacggcggctcgctcagcctgctcgtcgtcggcgactggggccgaaagggcacgttcaaccagtccagggtcgcccatcagatgggcagggttggggagcagctcagcatcgacttcgtcatatccaccggcgacaacttctacgagaacggcctgacgggcacggatgacgaggcgttcgagcagtctttcaccgatatctacacggcgaagagcctgcagaagccgtggtacctggtgctgggaaaccatgactacaggggtgacgcgctcgcgcagctgagcccggtcctgcggaagatcgacagccggttcatttgcatcaaatcattcgtcgtcaacgcagaaatcgtggagttcttcttcgttgacaccaccccgtttcaactcaagtactggactcaccctaaggacgatcactacgactggagaggggtggcgcctcgggaaaactacataaacaatctgctcaaggatttggacggggccatgaagacatcgactgcggcgtggaaggttgccgtgggccaccataccatgaggagtgtcagtgatcatggtgacaccaaggagctactgcagctactgcttccagtcctccaggccaacggcgtcgatttctacatcaacgggcatgaccactgcctggaacacatcagcagcagagacagcccaatccagtacttcacaagcggaggcggttccaaggcatggagaggagtgcagaaccccaccgaagatgacctcaagttcttctacgacgggcaaggcttcatgtccctccagctagaccgtagccaagccaagttcaccttttacgatgtcgacgggaaggcgctgtacagttacacacggtcgagcctgatggaaacaggccaccacctccaagcctccggctacgtcaacgaggaatgaagcaggggcgagtcagcatgcagcgctggagaactgagatcgatgcagttcaagcgtacgtataaattctcgagtgcttgatgtggttcatctgtcaagggcaacaacagttaggtttatatgtgtgcccttgcatctctcgacatctgtcactgccgtccggtactatttggggtcatgccatcgattcgaaaacatgacatggtaggggcagccatgatgtagcaaaaaaaaaaatagtgcaaatattcattatcgaggagttaaaacattaattgtgtggacagcggccgagcataggaccaaaatcagcagggggcaatcaacagattatgtaaaaattacatggttcagtggtgcgacaataaagacacagtatatatatggaaatatatcgtatgcaatcaagcgatgtgctacaccccaaaaaaaaaaaaaaaagactgttgtccttatacctaaaacctagtaccaattttagatctaacgttttttttcacctaaatagaagtactcaataaattttaattggatataccaggtcaagctgatgggcc

SEQ ID NO: 5365 - DNA, 2097 bp, Zea mays
cctgaccaccccctcgcctcgctttccccctcctctcattccattccacccacgccgcctgcctgcccctcgcctcgggggcgaaccaggagaaggggattccggctagggtttcgcggatcgagaagagtcagggaagaagcggggggagagaagagggcggcacctagggtttccgcgggcggctccccccgcatggccgccgccgcttcctccaaggcccccgccacctccgactccgactccgagggcctcgccgagagcctgcgcgcgctgtgcgcgcggatggactccgccgcgttcctgggcttcgtggtggcgcgccgcaaggaggcggacgcgctgcgggccgagatgccgccggcgctcaagctctgcgtggatccggccaagttcgtcatggacgccgtcgccgacgtcttccccgtcgaccgccgcgaggtccggaaccccgccgacctggcctgggcctgcgtgctcatcctcgaggccgccgtgcccgcgctcgccgacacggacccggacatcggccccgcgcgcccgctcgtgccgcgggccgcgcgcgaccgcgcgcggggcatggccagggactggaaggaggccgccgagaagaaggggggcgtcgagggcgccaagccgcccgacgcgcacgccttcctgcagctcgtcgccacgtttgccgtcgccgagagggaggacaggccgctgtaccgcaggattgtcgtcagcttctcctggcgccgccagatgccacgcctcgcgctcaccctcggactcgaggaacaaatggccgatatcattgaggaactgattgctaagaggcagcagcttgatgctgtaaatttcgcttatgaggctgggcttcaggagaagttcccaccagttcctcttttgaagtcctacctggaagactctaagaagacatcaaccgctgcttcagataattcaagcactagcagcggccaatcagggagcaatgtgaacaagaaagaacagtctgcactgcgagctgtcatcaagtgtgttgaggatcgtaaactagaagctgagtttccactggagggtcttcggaagcaacttgaagaactagagaaagccaagaccgagaagaagaaggcagcatcaagcgctaccagtggcggcagcggcggccctgcaaccaagcgcatccgtgcgagcactggaggcccaatgcctcctgccaaggcaggtcgtctcactaacaatgcttgcgtgtcttctctcccagctcccaccacattgacccagtctccctcccacgcgtcatacgccaacacctccccgtcccgcacctcatacgccaatacctccccatcccacgcctcatacgccacagtctccccaacccatgcatcatacgccacaccctcccctccccatgcatcatacgccacagcctccccttacccttacgacaggccggttggacacggcgtgtactgcacccggagcccgccggtgatcagggagccatatgtttacccagctgaggaggtagccaccgtcaacgtcggcattcccatggcctactccaccccgcccatgagctaccctgctgccccctacggcggctatggcaacgggatgccagcttacaccaatggaatggctcctgccttccaccaggcttactaccggtaggttcagtcaggaaacgaagaagtcgctgatgaatgacatgacaacaactgatgatgccaacgactcgaaaccccgctcaatggccctgttttgtagcgactgactacaacggtaggttgggtaccccatcttccatgtccttaccaccgctactactagatgtgttgtctttagctcctcgtctcatcttagtccgctaccgtaattttttttactactactaaggaacctggatgtaaattatgtatggtatcagcgagactgtcgtcgcagccttatgtaattctgttcagaacttttaaaaacgaaaaaaaaaaaaaaaaccagcatgtaatcctgaagtaccggtctaccggatgtaccgtggacttaattagaagtgttttttttatagtttaaaaaaaaaaaaaaaaacgccccccgactagtagactc

SEQ ID NO: 5366 - DNA, 2409 bp, Zea mays
ggggaccggcgagtccaccatcccattcccgtaccacccgcttcttccaactccaactctccaaggcgctgtgctggctgctggcctgctgctaccgactgccgcaactgctccgcatcccggccttgattagcagcagttacgcccgcgcaggacagcggccttgattagcgaagtattcctttgccctacctctctccctaccccattccgacgcggcggccgttgagcacctgcccggaagctatagcttcggccatggccccagatgccggcgaaagcggtggcgaactcccgccgcccgtaaagaagaagtcaccggcggaggaggaggccgagaagaggaggaagaagcttacacctgggagcttaatgaagggcattataaggtctgggagcggtgatgccacccctgcagatggcgatcaggttatacttcattgcactactcggacaattgatggtatcgttgtaaattctacaagaagggagcatggaggtaaaggaatcccactcagatttgttttagggaagagcaagatgatcctaggctttgctgaaggcttcccaacaatgctgaagggtgaaattgctatgttcaaaatgcagcctaaaattcactacgctgaggacgattgtccagttgcaactccagatggctttccgaaggatgatgaacttcaatttgagattgaaatgttggatttctttaaagccaaggttgtggcagatgatttaggggttgtaaagaagatagttgaagaagggaagggatgggaaacacctagagagccatatgaaataacagcacggataactgcaagaacagcagatggaaaagaaattattccgagtaaagaagaggcatatttcttcactattggtaaatctgaggtacctaaagggcttgagatgggcatcggaacaatggcacacaaggaaaaggcaattatttttgtcagtagtacttatttgacgaagtcctcactaatgccacagcttgaaggccttgaagaagttcatttttacattgaactggttcagtttatccaggtgagagacatgcttggtgatggtcgactaataaaacgacgtgtagttgatggaaaaggtgaatttccaatggactgtcctcttcatgatagcctattaagagtgcattataagggcatgctccttgatgaaccaaagtcagttttttatgatacacgtgccgataatgatggtgaaccgttggaattctgttctggagaaggcttggtaccagagggttttgaaatgtgtgttcggctaatgcttcccggtgaaaaatctattgtcacgtgcccaccggattttgcatatgataagttcccaaggccagcaaatgttcctgaaggagctcatgttcagtgggaaattgaactacttggattcgaaatgcccaaggattggactggcttaacttttgaagagatcatggatgaggcggacaaaataaagaacacgggtaacagactgtttaaagaaggaaaattcgaacttgcaaaggcgaaatatgataaggtgcttagggaatataaccacgtgcatcctcatgatgatgaagagggaaaaatctttgctaattcaagaagttccctacatctaaatgtagccttttgctaccagaagatgggcgaatacagaaaatccattgaaacatgcaataaggtgctggacgcaaatcccgtgcatgtgaaagctctttaccgccgaggaacgtccttcatgttacttggggacttcaacgatgcaaggaatgattttgagaagatgattaccattgacaaatcatcagaacaggacgctacagccgcactccttaaacttaagcagaaggaacaggaagccgaaaagaaggcgaggaagcagttcaaaggactctttgacaagaagccaggagagatatccgaagttggtgtagaatcagacggtggaaaggatgcaggtgatgcaagaggcaacggtggtgaggcaacgagtgctgatagaggtgtaaacacaaatgacagtccgaccagcgaatcagagtacgccttcgaggaagagaggcccgggcttcttggcagcttgtggccctctgcgaggatgatcttctcgtctcttggcatgaacaggtgcgcgatactctgaggtgtccagtttgtactgaggagacatccaaaatcatggcagtgaagaggaactgccccgaggtttctggtatttatttattagagtaagtttggatgtatggaaaatgaaccgtgtgcaagatgtaaatgagaaacaatatgcagggaattttaatagctatctaggattcattatcttccacggcataaaataatttcccaggtttcttctaaaaaaaaaaaaaaaaaagccgccagagtcttctagaacggc

SEQ ID NO: 5367 - DNA, 1830 bp, Zea mays
gcgttcgctactatatacaagcatattcaggggggggtgtgaactaaaaagaataagaaatggagtcaaataatatatatgtaattagagtaacgggaccggtcatcccaggtcccagtccaccggtatcctcacgcagccacgctaaattcgtctccacctcctccctcgtgacatcgtctcgcacggtcgctcccacctttccgcccgccgaaaccctagcccgccccgcctcgccgacggcgatgggcgctgcatgatcggtgcgtccccttggaaccgcctgccttctggcatcgccaagcccgctgccgcggctgccgtcgtcgtagcggcgctcgcgtcctccttcctcgccctcccgcgtcctcgcgccgccccgcccccagcgggatccgggcccctcatgtcgaaggcaaaggtctacaccgacgtcaacgttctgcgtcccaaggagtactgggactacgaggcgctcaccgtccaatggggtgagcaggatgactatgaagttgtcagaaaagttggaagaggtaaatatagtgaggtctttgaaggcatcaatgttaacaattatgagaaatgcatcattaagatccttaagcctgtcaagaaaaagaagatcaaaagggagatcaaaatacttcagaatctctgtggaggtccaaacattgtgaagttgcttgatattgtcagagatcagcattcaaagactcccagtttgatatttgaattcgtcaacaacacagacttcaaagtcttgtaccccacattgacggattatgacatccgctactacatatatgagctactcaaggctctagattactgccattctcaaggcatcatgcatcgagatgtcaagccccataatgtcatgatagatcacgagcttcgcaaacttcggttgatagactggggcttagctgagttttaccatccaggcaaggaatataatgtccgcgttgcatcgaggtatttcaagggacctgaactccttgttgatttacaagactatgattattctttggacatgtggagtcttggttgcatgtttgctggaatgatatttcgcaaggaaccattcttttatggccatgacaaccatgaccaacttgtgaagattgcaaaggtccttggaacagatgggttgaatgcttatttgaacaagtatcacattgagctggaccctcaacttgaagctcttgttggaaggcatagtagaaaaccctggtcaaagttcatgaatgctgataaccaacatctagtatcacctgaggccatagattttctcgataagctcctgcgctatgatcaccaagataggctcactgcacgtgaagctatggcacatccctacttcctccaagtcagagctgtggagaacagtagaacgagaccacaataatcgttgtctacaccctcgaaatgaagttgttgctaatttctggaacatcataggctaaaaccgttcaataagcatctcgctccaggaatctgggccatgactccgtggcagtgaatcagatagtatgggtcgcatcatgtgggcaaccttggcagatgtttttattgttatctttaatcttgggactactgtagctttaaacctacaggctgtgcttgaatgacatgatattcatatcatatcgtctcctgtggtgggatatgaaattgtatgttatctttaaacataaacatactggttgtattatggtgtgctattatgtatgtatgattcttatttattctgtgtgatattgtgatgaaatactcatggacctcagagatgaaatatgagtttcccaaaaaaaaaaaaaaaaagcggcc

SEQ ID NO: 5368 - DNA, 2061 bp, Zea mays
gctagttactaataatacatatatcatatatatataccattaagcaaagcttccacatgctgccgcccgccgcttttttttttttttttctagcagcaagagcatgcacttgttataacggaagggtatttagtcaagcataaagctacctctattacaaccactggtgacgacagctaggtgtactctacgataacatgtcaaagacagaaggcagactgaggagcagactgaggagtcagccttctgtttctgaagcacaagtctattgggattataaacacataggattaaacccctctccaggttcttttcctggattgcggacgactcagtccgtcagtccagcgtcatcggttgggcgatgcaacagcggaagcgagccttacggacagtggtcagaacctccacctccacctgctccagcatcctcacaatctcagcgaatgggggacggacttcagggtttgtgtcccagcacatggtcatgatctccgcaagggcagggaggcagtcgtggggtatggctggtcgcacgcccttgttaaccacagcaaatgcagcttgcactgcgctcatgtttgcaaaggggacattcccagtcactaactcccacaggacaatggcaaaactgtagacatcaactttctggttgtatggcctatgctggatcatttcaggagccatccagcggtatgttccagtttcaggtgtcatcccctcagtcttgacttcaatcctagccactccaaagtcagcaatcttaatggacttatcaccagaaatcaggaggttgtccgacttaagatctctatgaatgaacccaaggccatggacataggccatgccacgtgcaacatccaatgcctgcttgactgccaacttcagcgggacagacctgttctgcctcttgctcaagaaattcttgagagatccacccttcgcatactccgtcacaatacaccaaaccaatggcttcctgcacgcaccaatgaacttgacaatattcgggtgcctcagtgttgcaagcatcataacttcttggacaaactgctgctctaacagttgagctttctcagggtcagcctcaggtcgctccaaaagcttaatagcaacatccatcccattgtatgttcccctgtagagcttcccaaaggcaccttgtgcaaagggcattcccaagtggagcttccccagatcaatagtccactcctcataatccttgagtgtctcagttgggaacttattgtccatcagagcatgtgccagcgcatcctcactcaaggcgtgggacacccggccagggcggaagatgctgtgcccaaccgagtagcttcccacaatggcaggccccttgagaccaggatgaccaagcatgccagtgcgggagtcactgttagagccaacgctgctgttgttgtccacagacatggcgatggaccccccatgcatgctggtctgcatgctgttgaggctgtcgaccgacatgttggtgccctcccctagcttctggtagaaggccatgtcacagaagttcccaccaaagtccacaccaccatcatggccacccacggcgccgatgaagtcagggaagttgatgccttgcgccatcactcgacaaccgaaatgttagcctctgcagtaacttggctcttccccccggtcccccccaacagagctcccaaaagtctggcgattgattaccctttcgaaggctggccgggaacacgccgccgctgccgatgccagtcgatggaggaagatgaggtcggagccgcgcgcggaggtaccagcgatccggggagcgcgatcgagggagggcggacggacggtgggagcaggcggtgtgtgatgtgatgcggttgcggtgtggcgtcggaacggcgcggaccccctcgtctctggaccgaggaggacggggcgacgggggcggcgaccggtgggtgtgggggaggaagaggaaggcgaggggaacgcgagagaggaaaagatcaacaaaggcgagggcgaggcgagacagaagaaagcgagagtcccggccggcctcgaggggccccatgg

SEQ ID NO: 5369 - DNA, 2701 bp, Zea mays
gtcgttctcgtctttcggtactcgcgcgcgccagctcacttctctacttcccttcccagatctacctccattcttccctcaaaatcacagatctctctcggccccgtgcccagcgctccgaaaccctagcgccgccgcgggtgccaggccgcgagcgtcgccatgggcatcgtgtttacgcggctcttctcgtcggtcttcggtaaccgcgaggctcgcatcctcgtcctcggcctggacaatgctggcaagaccaccatactctatagactgcaaatgggagaggtcgtctccacgatcccgacaattggattcaacgttgagacggtgcagtacaacaacatcaagttccaagtatgggatcttggtggtcaaacaagcatcaggtaccggctctttatcatgatagtaaattcctgactgtcatttctgaagtaaataatactattgcatttatttaatcaccgatgaaaagcagtgcaatagaggtactctactactacctttttgtttattataagtaattggtggagagtggagacagtaccttgttattaccctgccacttcagtttccacaagctaaattatgaggctgtaagaatggacatgtttaatgaagataagaaaattttatttttttcccataacaggatgagcctgaatttaattgataatgcaacgaattagaaaggttcctcattgcagtgtttaatgtctcccaaaccatgtaaagatcaatctttttctaagacatgctgtaaagattattagatcatgctgactaatctagttgtttttgacatggaagcctggtctatggctttactgctatatgtacatcgtgcctgtcttggatgtaatgcttttaggttgatctttgccaccatggagataaaaaagaacttgaccatgagagagatatgcccctcgtgttcccttaagtaatagctacacaaagattggaagaattagacagctttatgttaataagaaaaggcacccaatttcacctaaatgagtactcgttggtggcctggacttaagtccacatcctcaaccagttgatcaaggctgtcacactatgatcccaagtgttatggtttggccttggatcatttcataatttggtgtcacaaccgcacaacatatatgacattcatgtatagtgtagtggatacacaatgaaaaatagttgtgtagttgaaggctagtaattccagtagaactagtttatagagtcgaaaatgtgagcaaggtatggtagtctagtctctatgacgctgtgtctagattcatttgtaacattatcctcagttgccaataatttgtttctatattcctttccatgtgagctccgctttaggggggaaacttggatagtgtttggttctggtgctggcaacatgacttatttacggagggtaatagatcctgttgcatgctgtttgagcgtaacgctcctgccactgtgctatctgataccaccattgtctttgctagccatgacagcatgtctccgtcaggttccctcacgtggccgttggatcaggatagcgtgtcgaaaacaaaatgacaggcggagccccactctgctttgttgtccagtagctactgtgttaaagttaccaatatctaaccaaacggatcaagtaattgcttaccatatttacgttagcgctgtttatccattccccttacatttgtgtttctttatcctaaccaaacactaccttaagggcatttcaagtattctactagttgtaagtattttttttctttttatacttgcataagtgttggaatggcccgtgatgacatatagcatgattttttcaatcctgagactttttgggtttcttagagaaaactaacatgtcaacttgtttgaattttcattgccacttctgtgcttttgaacatcagaactataaccattacttttgcatgatgcattttttcatgaactaatacatttaagtttccaagtatgggatcttggtggtcaaacaagcatcaggccatactggcggtgctactttccaaacacccaggctatcatatatgttgttgattcaagcgatacagataggcttgtaacagcaaaagaagaattccatgccatccttgaggaggatgaacttaaaggtgcagttgtccttgtgtatgcaaataagcaggatcttccaggtgcactcgatgatgctgccattacagagtcattagaactacacaaaattaagagccgccaatgggcgattttcaaaacatctgcaataaagggagaggggctcttcgaaggtttggactggctcagtaacacgctcaaatctggaagcagctaaggagcctccgcctcgtcatgaatcatttgctggaggctaaagaatagccgatgcttgcaagtcagcgcgcaaatcccattctctttgttttaactccagaagttctacaccgccatcaattatctgtaaagtgcgtgttaaattttttggatactacattagatgtacccccaggttgagatcaagaataggtctgtggaaaatgacgagcaaactgtgctactgtctttacccgtaaatctcatggatcatgacaagtttttttttgtaccccaatatgattaaacttactccacatttctatgttttcgtatcagtgatcattacagaaactgctcttaaaaaaaaaaaaaaaaa

SEQ ID NO: 5370 - DNA, 1796 bp, Zea mays
actccatagggccattgggtacctcgaggccggccgggaccgagagtggcagtggagtagtggtaggaaaagctcgtcgccgagtcgccgtacgggggctcggctcgggtgagcgagcggcggccggcgggtactgaggcctgagggcgaggcgatgggccgcctccgtgacgggcgagccttcctccaccgcgcgcttgtcctctcgtcgctgctccttctcgcctccggcgaaatcttcttcgaggaacggttcgatgatgggtgggatagccgctgggtgaaatctgattggaagaagagccaaggacaagctggaaccttccgacacacagcgggaacctactctggagaccctgacgataaaggtatacaaacaactggggatgccaaacattttgctatatcagcaaaattcccacaatttagtaacaaggaccggacattggtgatccagtactctctaaagattgagcaagatattgaatgcggtggtgcttacatcaaacttatgtctggttatctcaaccagaagaaatttggtggcgacactccttacagcttcatgtttgggcctgatatatgtggggatcagaaaaagaagctccatctcatactttcataccaagggcaaaactaccctatcaagaaagaactaaaatgtgaaacagacaagttgacacatttttacacatttattcttagacctgatgccacttatagcatccttatcgataaccgggagagagaattcgggagcatgtacactgactgggatatccttcctcctcgtaagatcaaagatgttaatgcaaaaaagccaaaagactgggatgacagggaatatattgaagatcctgatcaagttaagccagagggatatgattcaattcctaaagagatacctgatcccaaggacaaaaagcctgagtcatgggatgacgatgacgatggtacatggaagcctagaatgatacctaatccagaatacaagggaccatggaagcggaagaaaattaagaatcctaactacaaaggaaaatggaagaccccatggattgtcaatccagagtttgaggatgacccagacctatatgttctgaaacctttgcagtatgtggggattgaagtatggcaggtcaaagctggttcagtttttgacaacattttgatttgcgatgacccagactatgcaagacatgttgtagatgaaacttttgctgcaaataaggaggctgaaaaggaggcctttgaaggagctgaaagaaagaggaaggctagagaagaagaggaagcacggagggcacgggaggaaggggagagacgaaggcgggagagggatagggaccgcggcagggaccgatacaaggatagatataagcgtcataggcactacgactaccatgacgagctatagatcatgtattcttttgaaatctgcacgatattggatgtctgtctacggagagcgcacgtgcaaaacttgtatgttgtactcacggatgaagctgaacctgtgattttggcgatgggtagagattggccatcgcgtctgtaactaaatttccacgttgcgatgcaatatgagctgtagtactgtcctcgcactactatttaccgtttgtgctgcatatgtgatataaaccttcaagaaacacacacacgaagggtctgaatgagcacggcctttgttgtttgcttcttataaaaaagaactgttttatctgtgtatacttgccctactttttgctatttccaagcagctggacagaaactgactactgtaccagaaccag

SEQ ID NO: 5371 - DNA, 1871 bp, Zea mays
cggccgggggcaactggtacctttgggggaggcgaggaaggacacgaggtcggcgcgttcgtgcgtgcccttctcactgcacgccggtgagaattgagatcccagcaccgagacgacgacacaagtctcacctccatcctcctttactcctcatcccagatccctctctccgaaccccgccgcccgccgcagatccgagggtcatcggcagccatgatctcgtccagcaagctcaagtccgtcgacttctacaggaaaatacctagggatttgaccgaggcatcactatctggcgctggattatccattgtagcagcattagcaatggtttttttgtttggaatggagttgagcagttacttagcagtcaatactaccacatctgtgatcgttgataggagttcagatggggagtttttacggatagatttcaatatgagctttcctgcgctttcatgtgaatttgcatcagttgatgttagtgacgtgctgggaacaaacagattgaacataacgaaaactgttcgaaagtattcaattgatcggaatttagtaccaactggatcagaattccaccctgggcctatccccattctcaataagcatggagatgatgtcgaagaggatcacgtggatggtgcattttcattgtcatctcgcaattttgatagcttttcacaccaatatcctgttttggttgtcaacttctatgctccctggtgttactggagcaatcgactgaaaccttcatgggagaagacagcaaaaataatgagggagagatatgaccctgaaatggatggtagaatccttctaggcaaggttgactgcactgaggaagttgaattgtgtaggagaaaccacatacaaggatacccatccattcgtgttttccgtaaagggtctgatataaaggagaatcagggtcaccatgatcatgaatcatactatggggaacgtgatactgagagtttagtcgcggcaatggaaacatatgttgcaaacatcccaaaagaggctcatgctttggaagacaaatccaataagactgttgatcctgcaaagcgccctgctccaatggccagtgggtgcagaatagaaggctttgtgcgtgtcaaaagggttccagggagtgttgttatatcagctcgatctggatctcactcgtttgatccatcccagataaatgtttcgcactatgtgacacagttctcatttggcaaaagactttccccaaggatgttgcatgaattcataagacttactccctatcttcgtggataccatgatagactagctggccagtcttatactgttaagcatggtgaggttaacgccaatgttactattgagcactacctacaagttgtaaagactgagcttgtaacacagaggtcctcaaaggaactgaaagtgcttgaggaatacgaatacacagcacacagcagcttggtgcacagcttctatgttcctgttgtgaaattccattttgagccttctcccatgcaggtcttggtaactgaagtcccgaaatccttctcccatttcatcacaaatgtctgcgctatcatcggtggggtcttcacggttgctggaatactggattccatctttcacaacacactcaggatggtgaagaagattgagctaggaaagaacatttaaatttcgacgccgctgcaagtttaggcggatgcactaggtagccattgttttgttataactaggtaatgactcatgaaaatcggtatatgaaagatggcgtgctgaattgacagttgaaattcggggtggtcatgaactcatcatataataactagggatctcactgtttcgctaaaccactcacaataagacagtgaattgctgct

SEQ ID NO: 5372 - DNA, 1925 bp, Zea mays
gcacgacaccgccgccccgtgcggcgcgtgaaaggaacggggccgccggccggactcttctgacttggcaaccgccgcgcagcgcgacgagcgccacctgcttgctgccgcgtgcctgcgtgcgtgtgcgtccaccactgaccccgcgcccgcccgccgcccctgcccctccactccacttgctcactcgtcggctcgtcgcggcccgcttcccccccggccaagggatggacgcgcttcgcctacggccgtccctcctccccgtgcggcccggcgcggcccgcccgcgagatcattttctaccaccatgttgttccatacaacgaaatggtgaaggacgaatttgcttttctagccaaaggacccaaggtcctaccttgcatcaccatcagaaattcttcgaatggaaatcctcctattgtaggatatcacatcggtcattaaatacttctgttaatgcttcggggcaacagctgcagtctgaacctgaaacacatgattctacaaccatctggagggcaatatcatcttctctagatgcattttacagattttcccggccacatactgtcataggaacagcattaagcatagtctcagtttcccttctagctgtccagagcttgtctgatatatcacctttgttcctcactggtttgctggaggcagtggtagctgcccttttcatgaatatctatattgttggactgaaccagttattcgacattgagatagacaaggttaacaagccaactcttccattggcatctggggaatacacccctgcaactggggttgcaatagtttcggtctttgccgctatgagctttggccttggatgggctgttggatcacaacctctgttttgggctcttttcataagctttgttcttgggactgcatattcaatcaatctgccgtaccttcgatggaagagatttgctgttgttgcagcactgtgcatattagcagttcgtgcagtgattgttcagctggccttttttctccacattcagacttttgttttcaggagaccggcagtgttttctaggccattattatttgcaactggatttatgacgttcttctctgttgtaatagcactattcaaggatatacctgacatcgaaggggaccgcatattcgggatccgatccttcagcgtccggttagggcaaaagaaggtcttttggatctgcgttggcttgcttgagatggcctacagcgttgcgatactgatgggagctacctcttcctgtttgtggagcaaaacagcaaccatcgctggccattccatacttgccgcgatcctatggagctgcgcgcgatcggtggacttgacgagcaaagccgcaataacgtccttctacatgttcatctggaagctgttctacgcggagtacctgctcatccctctggtgcggtgagcgcgaggcgaggtggtggcagacggatcggcgtcggcggggcggcaaacaactccacgggagaacttgagtgccggaagtaaactcccgtttgaaagttgaagcgtgcaccaccggcaccgggcagagagagacacggtggctggatggatacggatggcccccccaataaattcccccgtgcatggtaccccacgctgcttgatgatatcccatgtgtccgggtgaccggacctgatcgtctctagagagattggttgcataacgtccaacatagcccgtaggtattgctaccactgctagtatgatactccttcctagtccttgccagcaccagtgacccaaacttggtcggctgagctcagcgctcagcagctttacgtgcatctgcgccttgacttgtgcagtgggcgtcgctagcatgaatgatgtatggtgcgtcacggcctgacggttcgtcagtctgggccgtgttttgtgtcaaaaaaaaaaaaaaaa

SEQ ID NO: 5373 - DNA, 1358 bp, Zea mays
tactctcgagtttttttttttttttaattagtgaaaagttcgattatgcatagccaataaactaattccctggcgtcgccagctgtttagttttatagagtatcaaacactacaacgaccaattgggacacgactaatctggaaaaaaactatcatcggagttcagttcttttactagtgtacactgcaaataacagaagttaaaaacaaacaattgtacacgttttatgtagctaaactctctaacaaaagccctggttgcgttgctgtaacttttatcttccgataaccatctaaaactttgctccaggagaagtggaagacggatgagatttactgacgtgattcaacaatgcttcagagctcagttttgcttttgctggatttggcaggcttctttgcccctttccaccatttctttaccataccagacaccttgtttacatgccctttcaacttcttgctggtatccttgaactgctgcacgacttgctgtttcaaatctttcttttgagagcccttgtttttcagagctttccccaagttctttgggaagttgtcatcctcatcttcatcatcctcctcgtcgtcgtcttcagtaccaaagttatttttcatcagatcgtccctggagtacattttcatgcttggggctcccggcataccctccattgatctcaatatcttttccatctcagcatcctttgatggcttccttgcaaatggttccccagggacacgatcttttggaactggcggtgggtccttggcacatgctttcgaaagatctttgcagagaaatttcataagctgatcgaccgaggggttatttttgtatacaaactcagcaacatcggtatcagcatatcctatcacctcctgacatgcacgctcaatggtcttgcattctgcattgcaatgcccttcctcatcttgctcaacaagctcgagcttgtcgcctttctcgacgatatcgatccggagcatccaatccgcctcctgcttcttcaggttgcagacattctccgcgacctcgatgatctcgatctccggtaccttcttggagggcgggagcgcctggtgcttcttggcgacctgcgcggagatctcgcgcgcgatccgctcgcacacctggcaccggatgtaggggatgtcctcccgcctcgcggccgtcgccggcttcttctgccccgccgcaacctccgccgtatgcaggagcacggtcgcgagcgcgacggcgacgagcaaggcgacggcgcgacgggccattctctccccacccctcactggttgggctcgtcgcagctgctctgttcggttcttgcagcagccgaactaaaacggtcagggctggtttt

SEQ ID NO: 5374 - DNA, 1183 bp, Zea mays
gcacgagggtgaacgtggtgagcctccgcccagaatgcaaccctactagtgctagctttcggccgcgaaaaacgtccccacccccacgtctcaactttatagccgccccctccccaccgccgcggccgccacgcgcagcagcaacccggtagcagcctagcaggagcgcagccagcaagctcagccccccaggccccagccctactgccaccgcgccgaacgacatggccgagccggcggagcaccgtccagctgaggaggaggaggccgcggcggccggcgaggatgaggacaccggcgcccaggtcgcgcccatcgtgaagctggaggaggtcgccgttaccaccggagaggaggacgaggacgcgctcctggacatgaaggcgaagctctaccggttcgacaaggaggggaaccagtggaaagagcgcggcacaggcactgtgaagctgctcaagcacaaagacaccgccaaggtccgcctcgtcatgcgtcaggcgaagacgcttaagatctgcgccaaccatctcgtggtggcgacgactaagatgcaggagcacgcggggagcgacaagtcgtgcgtgtggcacgcgctggacttcgccgacggcgagctcaaagaggagatgtttgctatccgttttggatctgtcgagaattgcaagaagttcaaggacactgttgaagagatagctgaacagcaaggaaagagcgaggagaaagaaaatgatgaagtctccactgccgcttctgatttggcacagaagttaacagtggcagagcccagcaaggaggaaaatgcagagaaagaggaggctcctgcatccgatgataagaaggatgataaagagtgaaggttgaaggcaaacaagggtcaaatggatgccattccattcatttcgtttccaaggttcagcttccccgcaaattttcattgtgttttctccgagatgaatgtttgtgttcggtgaaatcagagtcgtcagtcatctacatagcttttcttggttgatagactgttattttaagtcgcatgtttatctgggatggctggggtcagcatgtttgtacaattatttggagttgcttttggaatggacgcggtttgatgagttgcctacagaaaaaaaaaaaaaaaagctccacttttctggttcaacccaccgcaatagaatgggatgct

SEQ ID NO: 5375 - DNA, 1114 bp, Zea mays
  misc_feature (1075)..(1079): n is a, c, g, or t
  misc_feature (1084)..(1088): n is a, c, g, or t
ttttttttttttttttgcaaccaattcttcttgtggtatttggataaacattactgtacatctgcacaaaagggtaattaatagtagccatattatacactgctcttgtatatgccttgctatacactttaaagataaagtgatagcaaaataataagcaatcgaccagtctttgcgactgttcttaagtttctctcaagtcttattgtgccttctccatctggaactgtatgagattctccttccacaaactgttctccaagtacctttcatagaatgttacctcaccttccaatttcgctgctagggccaccatgcttcgtgttccatatcgtgcctgttcctttgcagtgtcaatgaatattgagcttagcttgtactcccactcagggtcgtcgccggtgtcaggcaccatagatctatcaggtctggcagtatccatcatcaactcttctaccatttgttttaaagaggcttctgcatcatcgtgtattgccaaatatcttttgaaaccctgtcctaagcgcattgcctttggccaaggggaattaattgcagcattcgaaagcacatgaagcccaggagcaactgtttgaatcacaggatcgcctccgggtctattagagatgtaaaccatggttcctgagttcacatcagccaatataaggttaaagccattgtactgatctgcttcctttgcaatttctgtggcatactccaatggacaaaggctgccctgtagaaacctgaccgggagctgtcctctggtcttggccccgatcagagagctgggttcccgcacgttggtcaggaaggcgagcttaccatccctcgtgcaccccatccacgttcccccgccgagctcgtccctgcctccaaggatttccttggcttcctcccccgccgcccaccactgcgccggctgcgtcggcctggagtgatactcgtcgcgattgaacagcagaagcaggcggtgcgtcgggtggcagtgccacgcccatgccgcgatgcacatagccgaccagcggtgatggaggtggaaacgtcctcccgcccgccttcgggttcccctttnnnnnaaaannnnncccggccggcctcgagggtcccaatg

SEQ ID NO: 5376 - DNA, 1707 bp, Zea mays
tctatattttataaaactatatacatattttaaaacatgggttattgcgttcttgctcccactttgattccaattatgattttgcccatgcttttcaaactttgtgatattttgcccctacttttctcagatgaagctgaaaattacccctgttttgtgaatttaccccactttcctccgcaaagtaagggtaactttcagctttaactaagaaaagtagaagcaaaattataaagtttgaaaagtagaggcaaaatcataattgggaatcaaagtgtgggggcatgcaagaacacgatagtccctttaaaacaatgctgagatatataaatatttgatttaggataaatgtaacacacgatacgcggagggagggggtaataaaaactccaaacatgcaacggggacgagacgtgccaggtgtgcggttctgtggccgtggaatgttaaccgtgaaatatggcaagcatctcgcgcctttgcgtttgggcaagagaattggaatggaatccaatacgcggccacctgatatgaacgaagctccttgaagcatattgcatgaggtcgggagtgatacgtgtgcggattcgccgcaccacgaaaggcattataaattcggggcagccagcctccctcgttgcagcggccgcggcggcggccagcggaggagggcacaggcagcagctaacatccctcactctcggtacctgacctgaccacgagagcaacatgggcggaggacacgacatgcacgggcagcactacggccacaacggcggcgtgaagggcttcgtgtccaacctcgtccacggcggcggcggccatggccatggaagcggctacggccatggccatggaaacggctacggccatgggaatggcggctacggcggcggccacgggtaccctcctcccgccgccgccggcgcgtaccctcatccgcacggcgcgtaccctcacccgcacggcggccacgggtacccttctcccgccacctaccccgcgcactcggcgcactacgggcacacgggcgtcgtaccacaccagccacatcatgccgtttgttatttgacgtttccgcggccggccgcgcgcggtttgttatcctggctgcgttgcgttgcccggggcacacggggtcgtaccacaccagccacaacagctacggcggcggcggcggccaccacggcatctacggcggcggcaagcacggcgcgttcggcggcggcaaccgcaagagcggcggcggcaagttcaacaagtggaagtgaagcgaccgaaacgaatcaaaacaacaccctcagtctcgcttcgcacacgtgcacccgcacacgaatcctagtgctacataataaagtgcaagcaggcaggaggcgtacgtgtgcgagtgagtgctgctgctgcggcgaccgtgtgaccgtagtcgttatttgtgtgtacggaataaagtggtgagcgctgagacgtgcgtgtcagcctagtaataactaaaataatggccgtgttcacgtaacgtgctcgccgtatgtaccatcgtgtgtaccggccgtacgtatgtacaagccgagtgcaataatacagtactatgtgtattattaaatcccatgctctgcatacagaaaaggacacatgctgctgctttagtaatgctgctagaaaattggcttgattatatcactgacagctctagctgttggatcttgactg

SEQ ID NO: 5377 - DNA, 2412 bp, Zea mays
ccagatcccgattcctttgtccaaactagccccttgtgtaagaaccaggtgaaagaattctgcagttttaaaccctttttaggtggtatgataataataataatcaacagatttaaacagcatgccaaatatgcagttcacatcatatctatgagactaagaccagtaagttctacaactgtttcagccataaaactgtcctgtcagttggcaaagtcccaatttcagccccagttttccaaagtcgttttcttttgcctcgggtgatcaatgcagaccggatcaaaaacaaacgaagtctagcaacttcacataaccaggaagagttaaaactactcggacaaaaaagggatagttctacaacgtgcatgcctattctacaatctttctaatccgtcgtcattggccgtgcctcgcttgcaggaccagccaacgtttaggctcaatactcggtgagatattgtttaatgcacaaagttaatgcaaggtgctgcctttaagcccatgagtgcaaatagacacagttgaatcactgtcgttgggcaggctgagattgctgcacctgcacaggaggaaagaaccccatgcctgatgattgaaagaatccagctgatgttggtgattgctgtggcgcctgagaggtctgctgctgctggggctggctctgagctggtggaagtggaggtggaggaggtggtccacttagtcccggaaaacctgccggcagaatgttggacaatggaggcggaggtggcatagagccagccatcatcccgaaaggtcctcgcattcccatcattcctccagtattttgaccaaactgttgcatgagcggtggcaatagaggtggcaatggcggtggagggggtgggaatgggcctggagttggtggatgtgtgcctccaaaagaagtaggcactgctccagcctgttgttgcacctgtgacgcttgcccaaaaaagggaggagcgcccgcctcggcctgccctgttttctccagcctaggcctcttatcaatatggaaacctggtggtactccagagagttctccagaaggtgatccgccgtttatggaagcagcttgctcagcggcaaaagatgagagaatggaggtcagcacctgcacaggtgctgacaaagatgcaagcttatctgccatagctgctgccgttctcttggactcatcacccactgcactgactgtagggggaagtgacactgcagggttcagtggttgtgaatggggaggtgtcgatcttactcctgaaccgtgcatcatagctgctgtttgatctggtggagtaatcatgagcggactagaagtagattgtgtatcgttcgtgacaaggacacgacccagttgttgtctaagttgaatggcatgttcagcctctgctcgagcgacttgcaattgatcacggagaattattgacttcgactcctgttcgctgagagcttctttcaattgattgatcagggatatcctcgccctacctgcactttcaagttgttcgatgcactgttttaaggtcatttcctgctcttgaaggtcagagatcaatgatgatgctggctgattaccgttgatgctagcatcgttaatatctttatttattctctccaaaaggcccacagtactcttacatttgtttagagctgtgtcttcatcaaaatgttgatcaaacactgattggtatgcagacacaatcttttcaggcatcccgccaacagtgagtttttttactactgtaccagaatccttccgtgcagctttggaatttgaagtgggattagagctaggatttaaactattcacattgttatccaatataggagggttgtcaccaagaatgctattttgcgtcccgcctggccgacgcccggaaactttacgttggtcccagattaatatcaatctcgccacctgcttcctcccttcctctcccccattttcataaacatgcttcagggatctaggtagaaccctccagaactcatccacatagtctgcccccttgcgtttactgttttgcaggatatcatttgatagatagaggaatggtattttcttctcctcccttgaactagtaaactgtttttcccatgtatctacaacccttttggccctcttgcggtgaaaaatgcaccattgtgaaagtgtctcaatgctagtggctgagttgttgagcctgttgagcttatcaatcagcatctgctcgctaaagaggccgccgccgccactgccgaccccgctgccatctcctgtttctgcgtctacatccgccttcgcgcccgccatcacgaagcctccaactaattctcggtagcgagttcctaagcttgagcctactgccgcggacgaggcgaagagggagtgggaggggaaggacccaaggatggggggagacgaag

SEQ ID NO: 5378 - DNA, 1736 bp, Zea mays
gcacgaggccaaaggcccggtcccccgtcgccggccgggccacgtgcgccagctcctccacccagattttgacaacgccttcccaacttgctcgctcccgcaacgacagcgcgcacttggattcggcgaccaccggagcgcggaggaggcacaggcgccgatctaaagacgatggccgccgcgggctcctcgccgtccttctcctcctcgagtaagcggctggaagggaaggtggccctcgtcactggtggcgccaccggcatcggcgaggccatcgttcgcctcttcatggagcacggcgccaaggtctgcatcgcggacatccaggatgaggccgggcagcagctgcgcgacgccctgggaggtgacgcgcagggcgccatgttcgtccactgcgacgtgacgtcggaggaggacgtgagccgcgccgtggacgctgcggcggagcggttcggcgcgctggacgtgatggtgaacaacgccggcgtgacgggcaccaaggtgacggacatccgcaccgtggacttcgcggaggcgcgcagggtgctcgacgtcaacgtgcacggcgtgttcctggggatgaagcacgcggcgcgcgctatgatcccgcggaagcggggctccatcgtgtcgctggccagcgtggccagcgccatcggcgggacgggcccgcacgtctacacggcgtccaagcacgccgtggtcgggctcaccaagagcgtcgccgcggagctcggccgccacggggtgcgcgtcaactgcgtgtccccctatgccgtgcccacggcgctgtcgatgccgcacctgccccagggcgcgcgcgcagatgacgcgctcaaggacttcctggcctttgtcggcggcgaggccaacctcaagggcgtcgacgccatgcccgaggacgtcgcccaggcggtgctctacctggccagcgacgaggcgaggtacgtcagcgcggtcaacctcatggtggacggaggcttcacagccgtaaacaataacctcagggcgtttgaggattagttgaggcatttatgccagctctgggattgggagggagtattaccgctatttcttctgctgttgtgacaagtgagtgcaagactaataaaccgcagcatgttcatgtagccaacagatgattgaacattccaagtatcattgctgaattcacgcatatagttgctcttcaaatagatcaagtacaatttcgtcctacagcgttgctgctgtggctatataatgaccttccaaaatcaagaagaatctaatcaccagctcgaggttgatgcgaagctacaaaagcatcattatcaagtgagcaggagctttcggccaattcagttacactagcccgtagggcatcccttttcttttcacaatgttaagtaggataccgttactagtgctctcaggctgcagcaaatccccttcgcaaacagccatgctcgtgggagtagaagcctgactggctctggtgttggcagtgttgcatgcctcagtctcagaattttctgtgcatctacctggcatagtaacacttgagctattgttcggcggtggatcgcttgggaaggtaggctctgaccaaatacctgcagcattaccctccacagtgcatgccctagttaattccgtgtcgatctcaaggttatgaatgaaactgatgaacttgtcagcagtatgatgtcctcattagaggcccaccactcctggtccaggaattaaggtcgatg

SEQ ID NO: 5379 - DNA, 902 bp, Zea mays
gcacgaggctccagtctggggctctgggcccaaatacaaaacggttggtgccaaagccgcccgccgccgtaaccctaaccccacacccactcataaaccctccgcctcctcgcctccctcccttccatccaatcctcggaacgagcgcgcgggcgaggaggacccccgacggaggatggcggcggcggctagggttttccgcgggtccctcttcctgatgtccccggcggcgggcgccaaggcgtcggcagccaagaaggcgggcgcggcggcggcggcggcggcggtggccaagaagaccgaggcggccactacgaagccgagactgccgaccgggatcacgaagccgatgccggtctccgatgagttccgcaggttcgccggcggcgcgcccgaggtcgcacgctccgaggccatcaagctcatctgggcccacatcaaggcccacggcctccagaacccagccaagaaaacggagatcaactgcgacgccacgctcaaaagcttgtttggcgggagggacaaggttgggatgctggagatcaacaggctactgaacgctcacttcccgaagaactagcaagcagcagtccgtggggccagtgatcgcgctttggtaaaggactttcttgtggctggcctcttgtggtccatgtgaagtcccaagtcccactaggtggttacgcccgaaaaccgtgtgatgccattaagacttacagactttgttcagcagttgggtttttgggcgtgatgcatgtaaaaaggatccccagtgtttctgtttctcttgtgatcctgtgaggacaccgatgtgggaaatctttaagtctgctaatggcaaatcttattagtctttaaaaaaaaaaaaaaaaaaaaaaacccgcgggggggcccggtaccca

SEQ ID NO: 5380 - DNA, 2574 bp, Zea mays
aaactggcattcgattcgcagcccaccagctccggtttcttccgactgcgagcttccaagtggcgactgcccgagtgcgagaagagggagagaagcggttgtcggaatccactccggccaggggtgcggaggtcggaatggggggaggattggatgaggcggtgaaggtggtggatttggaggacggtgaaggggaggaggaggcagaggccgccgcggcggagggatcgagcatggagatggggatgctgccaaggatgccggtgcgtgtgctgctcgccgaaggcgacgactccacgcgccacgtcatctccgcgctgctccgcaagtgcggctaccgagttgctgcagcctcagatggtgtgaaggcgtgggacctattaaaggaaaaatctttcaaggtagaccttgttttaactgaagttgaactgcctttgatgtctgggttcctcctgttatccacgatcatggaacatgatgcgtccaagaacatccccgttataatgatgtcttcgcatgactcagtaagcatggttttcaaatgcatgctaaagggtgcagcagatttccttgttaagccgataagaaagaatgaattaaggaacttgtggcagcacgtttggagaaaacaactggcaaacggtgggcctaatgttcagcacatacaacgagaagagaatcttgcagaaagaatccaacagaagactggtgtgacaaaagctgataatttggacagagatgtgccctgtaaaaatagagaatgcagtgaacaagaaagtgatgctcaaagttcttgcacaaggtcagagctggaggctgaaagtaagcaaacagacaacattttggagtataagcaatcaactcaaaggcacttgtctattcctagccacaagaatgttgagctaaatggacagaccaaaatacaaagagctaagggtaataacttgatcccagcaagcgaagacgatttatcgccaaagaaaagaacgtgtttgaatgagaataattctgagagagcttcaagagatatggagctagtccacattatggaaaatcagcagaagtataacacacagtgggaggtggatactatgagaacaacatctaggggaaatgatgagaagggctccatcccagcacatcagttggagctttctcttagaagaactgactacggaaaattagagaaccacgagaaaaatgatagaagaacactgaaccattcaacttcctctgcgttttccttgtataattgcagggctgtgccaaccttaggaaatgctggtgatggtcaattatgcagcacctcagaaacactagtggatgttgaaaataaaaatggagattcagcagatccctctcaagacatgactgaaacaaatcgtcctcctattagagttgttcctgtccctgtccaaggtctcacatttgatgggcagccattctggaatggtacaccagtggcatccctattctactcgcagtcaactcctcccatttggaatagcaaaacatcaatgtggcaagaatcaaccccacaagcaacttcactgccacaaaaatctcgacagaatgaaccaaatgaaatgggggctaaaccagttataaatgcaggggaacaatttgccatgggtcctcccagtgccagtgggaagcagctgcatgttgaaattcttaatgatgatccacggcatatttctcctatgactggtgaaagtggaatcagtaccgtgctagacagcaccagaaatactctgagcagtagtggctgtgatagcatttccaaccagatcactgcccctactgaatcatccaatgtatataaggatgttcctgaaaccccaagcgccgaagggtcacggcatctgagccagcgtgaggctgcactgaacaagttccggctaaagaggaaggataggtgctttgagaagaaggttcgataccagagccggaaattactcgcagagcagcgtccacgggtcaagggccagtttgttcgtcaagatcatagcatccaaggaagctagggtccagttactgagctggaactctattctattatctaaaaaaagtcactgcaagtgactccactgcggtctgcgggtatcctgatgtcagattttgccgaagagttggaagcagtcacactgagttacagtttgctctgtatatttgctgaagtttgtaatatatgtatgtataggctaacgctgttctttcctaggttaggcacaggacctggcacgtttgaaggtttatcagtaggcgttagaaaatacaggcatactttgtttcaggtcaagatgagatgtgaccttcagtagcgcatgtgtgctttaagtcttgtattacgtaattaagttgtttgatgtttcgggttagatgtacgctccgtggatgaaatgtaaaggatgtccaccaaaacatgcttgtttccgtgcagcttgttgcaatgaacatcgttggcctggtttctgtcgaaaaaaaaaaaaaaaatgcactactgtgaaattttctgcagacggtatgaagtgctactctgaactcgagtgatcggttatgtgagcaggggta

SEQ ID NO: 5381 - DNA, 1192 bp, Zea mays
cattgggtacctcgaggccggccgggactccactgtgctcctcacagtcccaccccgccggggcggcgcggagcgagcacgccgtcaccttctccaccccccgcccctgcccctgtgtgggagtaggtgtagccgcgtaagcggcagcggcgtaggcctcagctcggctcagctgccgcctcgctcgaaccagaggagccaagcagaggaagcgaggcggagatgtcggcggggctggtgaccgacgaggccaccgtggggcggctgtaccggatccggcgcacggtgatgcagatgctgcgtgaccgtggctacctggtggtggaccacgagctcgccaccagccgccgcgacttcctccgcaagttcggcgagtccttccaccgcgaggacctcctcatcaacaagtacaagaagaacgacccatccgaccagatatatgtcttcttccccaacgatgacaaggtagggatgaagcacatcaagaagtacgtcgaaatgatgacgcacgagaacgtctccagagctgtgctggttctccagcagaacctaactccgtttgcgaagtcgtttctcatagagctggagccgaagatccatctggaaattttccaggaggccgagatgcttataaacatcaaggaacatgtccttgttcctgagcatcaggtgctcacaaacgaggagaagaagacgcttctggagcggtacaccttgaaggaaactcagcttccaagaatacagatcacggatcctattgctaggtactacggcctgaggcgaggccaagtcgtgaagatcatcaggcccagcgagacggcgggcagatacgttacataccggtacgttgtatgacagaacgtcagaacactgaagaagaagagaaccacagatatgtcaaaaaaaattcaagctacacataccccacgtgcttgcagacatctgtatcgctttgtagcagcagccactggtaacgatcggtggctgatgtgtaagtgtaagtggattgaataagctgagtcagagcatacgagaattctcatgttgtacacttgtgttttatgaaccgcataaacactcacgacgataaaagaagcctgttttcggagcgacagagaagctcctgcgatcaggatttcggatttcgccaaaaaaaaaaaaaaaaaaaaaaaaaaaaaaaaaaaaaaaaaaa

SEQ ID NO: 5382 - DNA, 2150 bp, Zea mays
  misc_feature (48)..(48): n is a, c, g, or t
tttcccccccccccctttttaaaaccccccccccttaattttattttnttcccacaaaaaaaaaatttattttttcaaaccccccttcttaaaaatttaacccttaaaaaccccccccccttttttttttttttttttttttttttttttttttttttttttttttttttttttttttttttttttttttttttttttttttttttttttttttttttttttttttttttttttttttttttttttttttttgctactctgattaagcagatgcattacttattgctccataacaaggaacaactgtcgctatgcaaccgactacaagattccagcccagcactttactgaaataaagtttgaaaatacactgtatattggacactgccatcaccatcctcaccgtcgttacaaccagcagcatcggctaattcttcctggatttcagttctacaatccgttcctctgtagccttcagagcatcgccgaatttgcttatgatttcttcgacttcattgggagtcatgatcagcgggggtgacagcatgatgctgtccccagccaccctgatgagcatcccacgcttctcgcactccgcgccaaatatcgaaccaacaccccattcagctggaaatggatcatttggagatttgttgtcgacaaattcagttccaagtatcagtcccagaccgcgtatctccccaacaattgggctgcctgagaaggccttgattccctcctggaaccttggagcaattttgttaacgtgttctacaatattcctttccttatatatcttcaaggtttctacagcaacggcacaagaaacaggatgtcccgagtatgtaaagccatgagcaaaagaaccaagtttattgctctgagaatagattacatccgttatttctgggctaacgagaattgctccaattggcatatatgcagaagaaagagccttggctatggaaacaagatctggtttaatattatacatatcacatccaaacattgtccctagtcttccaaatgcagtaatgacctcatccgcaattaacaagatgtcatacttcttcagaactgcctgaatcttctcaaaataggtctttggaggaaggataacaccaccagcgcccatcacaggttcagcaatgaaagcagcaattgtttcaggtccttctttgaggacaagattctccaaattattggcaagtctagttgaaaactcttcttctgtctcatcaggaagacggaatcgccagtagtgagggcagtctgtgtgcaggacaaaaggtgctggtagatcaaacttctgatgaagcgctggcagacctgatagactagctgcaatcaaggttgatccatggtacgattttgagcgagcaataaatttcttcttgtctggccttcccagtgcattattataataccacactagtttaacctgggagtcatttgcttctgaaccactatttgtgaagaacacctttcccatttcccttgcggtgaacatgctgagaatatcatttgcgagatccaatgagggtttggttgtacggttccaaaaggaatggtagaacggtaatttgtttaattgctcagttgccgctttgactagtcgaggctcattaccacctaaagctgtgcaccacagtcctgcaagagcatcaatatacttcttcccattgctgtcatagacataagaaccctctgatctctctataaccaatgggtgtacatcagtgctctgccatcccgctgtgaatggagccagcatgctgtgccccttaaacccattttcttctgtcgcctgaagtgaaggttcagagctgtaatgtctggcagacggctctgataaactgtgccccccttgcaagcttccagcactagcaatgtatttcaccagcttgctaacctgggaggaggcagcactggatttgcggaggccgtttgcgatcatctcgtatcgcctgggttccggttccgccgacctcctcacttcacttcacgggttcttggaagttggaactggggaggaaccgaggaagcaacacgcgagagggacaagctctgggtggtgccggacgacggggacgtgacggaatctttatcccgtccataactgtcgccgccgaaattgcgggcgccaatgg

SEQ ID NO: 5383 - DNA, 1612 bp, Zea mays
ccccccccccccccgccgtcccaacgccgtacccaggggccaggggtgggcgggcgcaccgcaccgcacgtcgctgtcgcgcgtcggcccggagaacgcgtacgccgcccgtctcctccctccccgcgataaaaggccttcccctcctccccagcccccaccagctcaggccagccgtgcggcagcttctcccctcgcctccccccctcgtctccgcacagagagggctcctcgctgccgtgtgccgggcttcactttcccctctcgtctcctctcccatggctcagcgcgacaagaaggtggaggagccgacggagctgcgcgcgccggagctcacgctgtgcgccaacagctgcggcttcccgggcaacccggccaccaacaacctctgccaggcctgcttcctggccgccacggcttcctcctccgcctccgcctccgtctcgccgccgccgccctcctcctcctcctcgtcgccggcggtgctccagttcgacgagcagcagcagcagcaaaatccgaggccgcgtgcgccggcggcgtccgggcccacggaggaaccgcccaggccggcccgggcgtcagctccggctccggctccggcgtcgtcctcgtccgtccgccggtgccagacctgccgcaagcgggtggggctcacgggcttccgctgccgctgcggagacctcttctgcggcgcgcaccgctactcggaccgccacgactgctgcttcgactacagggccgccggccgcgacgccatcgccagggacaaccccgtcgtgcgcgccgccaagatcgttaggttctaggcgtctcggatccggccggaggagctagctagctagctaggggcgggcacacacacgcacacgcggtgatgggcgccgagatccgtcgccggtcctcatcgccctctatagtccgtccccccttcctctcctcctctccctctttgattgtcctctccttttcttcttgctgtcatctatttttattgcgagggggaaaaatgatttgatggtcaccgatcgatccgtccatggagggtgttggttatgtgttgatcgccatgctgttctagaaaattattccgtctacgaggacgacgatcgacgagaagcgtcgaaaaagagaggggagagagaatgaagacgaaaagaatagtgcgatgataacgttgttgttgttgtttgtagcggtggtggtggtggctggtggaagcgatatggttcggttcggttcggtgtgctcttgtcctgctgcgaatcacaaattcctgttgaattttttttatatatctttgtataaaacgaaattgaaaatgtttatatggtgtgccatgacagctataatactacccatttcattcgtaaaaaaaaaaaaaaaagtgttgtggtggtgaccggtgcggtgtgctctaccacaccatcatggttggttggatggatggatggatcagctcaccagctgctaggagagtagccgacctaaattattattttacatatcgtagagccagacgacagagagagagctcaaagctgtaccactcgagctggaaaaaaaaaggtcctccacccaataatctttgtgagcatccagacacaggcaa

SEQ ID NO: 5384 - DNA, 2236 bp, Zea mays
ggcggggagcttcgcgtgcggcgtggacgatggcgcgcgcgccgtgctggccgccggcgctgtcggccacatcactcgcctcctcgctcaccccgacgagaaggttgtggatgcatgcgcacgtgctcttagaatgatatatcaatcaagattagctccaaagtttgatggttatagtggggaaaacgtggattttgttctttcccttttggacagtgagaacgagaatgtcacagagctggctgctgctattgtatctcactcttgtgagagtggtgcagaacaattgtcactatgcagtgctggagttccacagaaacttgttagtctttttggatgttctatgaatctacgagatgcttgtttaggttctatcattgcagttattcaaaataaccaagatgttgcttcaagatttgcatcaacggaccatggaaaaggttttcgttcagtagttgggttaatacatgatcggagtccacgcacaagattacttgcttgcctctgcttgattgcacttgggcatgcttctcctgatcattttcaggacaatcagattaagaccaagttgattatggttttacttgagctaattgaagaacctggtcatgtaggagatgaagctcccttggcattaaccaccctgattaaagacagcttcgaactgcagagacaagctcttacaacgaacgcagttgagaagctcagcaaccatctactagcaaatccattggggacaaggcgagcagtgaccatattacttgcgctatctgaactttgctcaaaacttgaagagtcaagatctcaactgatgtcggttgaggtatcaaccttactccttgaggcattgaaacatgattgggctgatatccgtgttgcagcatgttcatgtctgaagaatatctccaggtcaccaaagatactcagtggaggtcgattatcctgcgatacagttatcggtcccctggtccagcttttaaatgactcatctacttcagtccaggttgctgcccttggtgccatttgcaatattgccgttaatttgacacccaggaaatcagttcttcttcactccggggttgtctcacaacttgttcatttgtcaaagtccatggatccaatgttgaggctaaaatctgtatgtgctctcaggaatattatgttccttcttagtcctaaggataaagacttcattgttaaggagttgaccttatctactctttcaagcctcatatgtgattctgaacattttgttcaagaacaaacattggcacttgtgcacaatcttgttgatggatatgtggtctctgctaattatgtcattggtgaagatggaatggttatggatgctattgcaagacaactgaacaatgcatctgctccgggagtatgcattcagggtatgtatgtgcttgcaaacattgctgcgggaaacgagtggaacaaggaagctgtgatgaatgttcttctgcctcacagagcagatcgcatcaaaccgtcgtttgcagtgaactttctgaaaagcaaggatagacagttgcgagttgccacactgtggtgcgttctaaacttgatatacccaaaatgtgaagcctcatctggtagagccgtcagactacaaagtgctggagtgatcctacaagtgaaaagaatgataaatgacccctgcttggattgcaagcttagagttcgtatggtgcttgaccactgcttggacaacgctgatgattgtttcatgtgaacaacctgtatttcaccgtggcaacccaagtttacggaactatattcagatcaggaaagaggaaaccagtgtgcttcagatccaaatatatgccactgaacagtggacatgagcacctgcagaaagcttttgctgatctctgcgggtcttcaagaaccagctgccttttttgcaccatgagaacctgacaaccggcatctgttgtgcatattgtccattaccttgttgtgaccgatgttgtctagtgaacttgggctgcctgctcgcagtctgaaaggctttaggcgctatggatccagaaatcccatttttcccagtgcctgccgaacctggtgcatgcttttgaagttgagtctgtaaatgagtgactgctgtaactgttgtacaaaatttgtatttctgttccaataaggccgtatttaacatgcacctatgggttagatgtccatggattcccatgttctatgaaaataaagaagatgcaagtttctatgc

SEQ ID NO: 5385 - DNA, 1576 bp, Zea mays
gcaatattccagaacacagcctcagcaccttccttcttctccgtctcgtcgtccctttccatttcctctcccatttatgtccccgcttcaggtctgccaaataaacccccgaaaagcaggagagcgagacccggtagtggaagactagggttagggtcccagctccgccgttgtctgggcgagtcgagacatggccggccctgcccccgccgttgcagccagtgccgccgcctcacagtcgccgccgatgcagctgccgtcgccgttcgcggagctagtcaagggttcctccggcctcgagaagatcgtgcttcgcggcgctcgcaactgctgtgccgagatctatctttatggaggtcaagtaacatcatggaagaatgacaatggggaagagttgctttttctcagcagcaaggctattttcaaacctccaaaagctattcgtggtggtataccaatttgctttccccaatttggaacacatggaaatcttgagcaacatggatttgctaggaaccggttttggactatcgacaacaacccaccccctttaccagtaaaccctgctattaaggcttatgttgatctgattttgaagccttctgaagaggatttaaagatctggccccacagttttgaatttcgcttgagagtttctcttggaccttctggagatctgagtctcacatcccgaatcaggaataccaacacagatggaagacctttctcttatacatttgcatatcacacatacttctctgtctctgacataagcgaggtgcgtgtcgaagggctggaaacaatggactaccttgacaacttgaaggcaaaggagcgtttcacggagcaaggcgatgctattgtttttgaatcagaagttgataaagtttatcttgccgcaccctctaaaattgccatcattgatcatgagaagaaaagaacatttgtcgtgacaaaagaagggcttcctgatgctgttgtttggaacccttgggacaagaaggcaaaagcaatgcaagattttggggatgcagaatacaagagcatgctgtgtgtggagcctgcagctgttgagaggcctattactctgaaacctggggaagagtggaaaggaaggcttgtgctttcagctgttccttcgagttactgtagcggacagttagatccatcgaaggtccttcagggttgaaaatcctcactttctgcatcttgtacagaagttcattgcccttaatatttgatgctgggctggcgtcaacgccgcatgttccttttgccatttccaccccctatatttctggtcccttttgtatctagaatttgagtgataggttgattccgaataacagtctgtgatttgagcttaggattgggtcatctcatcgatgaatgataccgctggacaaaatgctggcgtacgtgtcagtttcataaatcattcttctcataaattctttagcatgtacttcgtagttgatcatgtttcaaaaaatggtggacccttttgttactttcttgtctgataaggtttcgatcggtggttaaaaaacaaacaaaaaaactcgctcgtgccgaa

SEQ ID NO: 5386 - DNA, 1776 bp, Zea mays
gcacgagaccattacctagaacatcctaatcgaaaaactctctcccgcgggtctcggcctcctctcctcggctcgctataagcaggctccaccgcttccgcaatggccacctaattcgctcggcgtcgggggagaagagaagcgcgcgcgatggcaccgggaagatctcttcgccctgcggggacggcggcggttctgtgggcggcgtcgctgctgctgctggcgacgtcgtgcgcgcgcgcaggtggcgcgtacgcggggccggggtgccggaagcacgtggcgagggtcacggagtacggcgcggtcggggacgggaggacgctcaacacggcggcgttcgccagggctgtggcggacctggcgcggcgcgcgcccgacggcggcgctgcgctggtggtgccgccggggaagtggctcacggggcccttcaacctcaccagctgcttcacgctctacctcgacgagggcgccgagatcctcgcgtcccaggacatgaagcattggcccctcatagctcccctgccgtcctacgggagaggaagggacgagcctggcccaaggtacagcaatttcatcggaggatccaatctcactgacgtcatcatcacgggcaaaaatggaacgatcaacgggcaggggcaggtctggtgggacaagttccacgccaaggagctcaagttcacccgcggccacctcctcgagctcctctactctgacaacatcatcatctccaatgtcaccttcgtcgacgcgccgtactggaacctccaccctacctattgcaccaatgtgaccatcagtggcgtcaccattctcgcgccggtgaattcgcctaataccgatggaattgacccggattcttcctcgcgtgtcaagatcgaggactgctacatcgtctccggcgacgactgcgtggccgtgaagagcgggtgggacgagtacggcatcaggttcaacatgccgagccagcacatcgtcatccggaggctgacctgcgtctcccccacgagcgccatgatcgcgctgggcagcgagatgtccggcggcatccgcgacgtgcgcgccgaggacagcgtggccatcaacacggagtcggccgtcagggtcaagtccggcgccgggaggggcggcttcgtcagggacatcttcgtgcgcggcctcagcctccacaccatgaagtgggtgttctggatgaccggcaactacgggcagcaccccgacaacacgtccgaccccaacgccatgcccgaggtcaccggcatcaactacagcgacgtgttcgccgagaacgtgaccatggccggcaggatggagggcatccctaaggacccctacaccgggatctgcatatccaacgtgaccgcccgcctcgcgccggacgccaaggagctgcagtggaactgcaccaacgtcaagggggtcacctcccacgtctcgcccaagccgtgcccggagctcgccgcggagggcaagccgtgcgccttcccggaggaagagctcgtcatcggcccacccgagctgccgaagtgtagctattgaggccgattgccaaaagagatcattgatcatataggctcttcggtgatagtctagacaaccagtatgagaaatgcagctgaaatacgtttgcattacagtgtccgtctcacattactgcttcctccgattacaatgtctggcagtggtataacttgtgactacaaattatgcatcaagaagaaatcagcaaaacggacatgatcattgcaaacctttttcataggtgcacaagtt

SEQ ID NO: 5387 - DNA, 2699 bp, Zea mays
gcaaggcaagtagccgctgcgcggtgctgccacctgacctgactgccgtcccggtccccggtccatccgaacgccgttacggggccgcccaccgcgacggaacggaaaggtgcggtcaacccaccccgtcccagtcccatcaccgccgggggccgggtggataaacaaacccagcggcccccgcccccggcccgcctcattcccttccttcctttgctcctcccctgcctcgcctctctcccctctcctcgcctccagctcctgctcggcccgctcgcgtccagctgcgcgcgcgcctgcggtggccgtgaaggacagcccgagggacgcgccgggtgcactgatctgggggccgcgtgtccccggtggtggggcgaggcggcgccggcttccaggaatgggcagcttgtagtggctgtttcttttgcatatgcactttctattgttgttgtcatttcaaaggaggccatagtctcctggattttgtatgccttgttatctggaattggtgaccatagatgtcatttcgtagcatagtccgtgatgttagggatggcttcggcagcttgtcgaggagaagctttgaggtgaccctcgcaagcatttatggccttactgggcatcacaaagggaagacccagagctcatcacatgtgctcgacgactcaccttccataattcgtgaaagtcgatgggcgaatctacctcctgaactcatccgtgatatcatacggagactggaggctgatgagagcacctggccagcgcggaagcacgtcgtttgcttcgcagctgtttgtaggacatggagagaaatgtgtaaagagattgtgttgagcccggagttttgtggcaagctcaccttccctgtgtctctaaaacagcctggtcctcgagatggaaatacaatggtccagtgttttataaagaggaataagtcaaaatccacttaccatctctacctgtgccttagcaatgttgttacttcagaaagtgggaaattcctcttatcagctaaacgacaccgcaaaaccacatgcaccgagtacactatatcaatggattctggcaacatctcaagatcaaaaagaacctacattggaaaaataaggtctaacttccttggcacaagatttttaatttatgatacacaaccgccctataatggggctgtagttcctcctgccggaaggacaagcaggaggttcaactccacaaaagtctctccaaagctgccttcagtcagttacaacatcgcacaggtatcgtatgagttaaatgtccttggcacgagaggtcctaggcggatgcgttgcatcatgcactccatacctgcatcatcagtggagccaggtggcacagtgcctggacagccagagcagattgtacctcgagccctggaggattcattccgcagcacggcttccttctcgcagtcgttccgtagcactgcctcattctccaagtccatcatggactcatccatggatttcaatagcgctcgcttctctgacatcgctggcagcagcgctcgcttcacgggcgttcctggtagcagcgctcgcttcgcgggcgttcctggcagcagcgctcgcttctcgggcattgctggcgccagactggacaacgacgaggagagtgaaaccaaggagaggccactggtgcttcgtaataagccgcctaggtggcacgaacagctgcagtgttggtgcctcaacttccgtggccgtgtgacaattgcctcggtgaagaacttccagctgatcgccgcggctaccccgccaccggcaggtgcgccaaccccctctcagcctgccccgtcagatcccgacaaggtgattctccagtttggcaaagtggcaagggatatgttcacgatggactatcgctaccctctctcggctttccaggcctttgccatttgtctgagtagctttgatacaaaattagcctgtgaataaatggagaagaacaaaggtaaaggagaacatcaggttgcttgcattaggccatcagtgtacctctttccatctggctctcgtgttgccttggttgtatttgtgcttaatgtagccatgaagttggtggccatatatggacgcatgtgttgttgttggccctctcccttagaagtgattaaaagttgcatttggaccacatgttacccgatctgtaatatacttgcagtggcattgcatgccgcgtgataacaaagttcccgttcgtgattggacttgtatggtttcagaaaagcagcaaacaaagtttggtacggtgtgcatttttttttcctcgtctctggattggttactgtttgaagtgaactgcatcttgtctttcgcccctgtgtcttttgagaagcgagcaagagggctttacggctttgtctcacctcaaaagggatcgccgccgagtgccaaaccccacccacccatacatccatccttttatcagtggttatgagcacgactatatgtaatcatcattgcctgcattacctacaacgcgtatccctcacagcgttgcgcattagattcagatttagacgggcaacaatgcctgtgtgtgacatgggagctcgagcatcatatcacatgaacctgcttgtgcatgccttttcggcccgaataaagccgagctctttcggtgtggccctgtcttttgttatgagttgtttcggggggaagacgccggaacag

SEQ ID NO: 5388 - DNA, 1177 bp, Zea mays
gcggtgacgaccgacagagccgccgccttacgtccagctgccacggtacttcatcgggccctttgccggtgcaggcggcgcagcacccaccgcaccaggattctgattgctcttcattaggctataaatggcaggaaggcaccgggcaccccgacaataccatgatgaacctcgaggataccgtgatggtccaccacctccacttccacgaccaagacctctctcaccgcgtcgcatggcagaggaactgtctaggcgccgtgctgagatccgtagaatccatgaggacaatcagcgtctggcggatgaaattgttagtctcaagcaaaccatgccgcgtttgcaagaagacctccgaatctcaagccaggctgttccaaagctccgggcagagaaagagctcgagtcgagggagctgactcagaggaacctgaagctggaagctgagctgcgtgccttagaacccctcaggcaagacgctctgcatctgcgatctgaagcaagtaaactgcagtctctgaggcaagagttggctgcgaaggttcaaggcctatcaaaagagcttgaacttcagaagtctgaaagccagaaaatgactgctttggtagctgaacgtgatgcgctgtgtcaagaactgctccaggctagggcgaaccttgagtttgagaagaaggcgaagccagagctgactgcgcaggttcaggcaatggagaaggatcttgtggctatggctcaggaggcggagaagctgagggctgatatcgcgaagagaaacacacctactagtttcagcagccgtggaacgtatggagcctcgttgtcgactcctgggatgggtttgcaaggcatgtatgatggcggcggctattctatggctgggagccgctacggcagtggcactggggcttggagctcgcacgatccccatggctacccgcatctttaactgtgcttctgaccggtgtttcctcctgaacagctccctgagtaccttggctaagtttcttgtagtagtataacttgtggtgcaccattgctacccttcctctggtcaatacacaacaatataccaactttggttgtcttggttgtttttcccctactgcacacggtgacgctgttgtgagcattagatgtttggccactcggccgttttgccgtggtgagttttggcttt

SEQ ID NO: 5389 - DNA, 3788 bp, Zea mays
  misc_feature (3220)..(3220): n is a, c, g, or t
  misc_feature (3222)..(3222): n is a, c, g, or t
  misc_feature (3229)..(3230): n is a, c, g, or t
  misc_feature (3246)..(3246): n is a, c, g, or t
  misc_feature (3250)..(3251): n is a, c, g, or t
  misc_feature (3253)..(3253): n is a, c, g, or t
  misc_feature (3263)..(3263): n is a, c, g, or t
  misc_feature (3266)..(3266): n is a, c, g, or t
  misc_feature (3275)..(3275): n is a, c, g, or t
  misc_feature (3286)..(3286): n is a, c, g, or t
  misc_feature (3291)..(3291): n is a, c, g, or t
  misc_feature (3294)..(3295): n is a, c, g, or t
  misc_feature (3299)..(3299): n is a, c, g, or t
  misc_feature (3304)..(3305): n is a, c, g, or t
  misc_feature (3308)..(3309): n is a, c, g, or t
  misc_feature (3314)..(3314): n is a, c, g, or t
  misc_feature (3317)..(3319): n is a, c, g, or t
  misc_feature (3321)..(3322): n is a, c, g, or t
  misc_feature (3327)..(3327): n is a, c, g, or t
  misc_feature (3332)..(3334): n is a, c, g, or t
  misc_feature (3336)..(3336): n is a, c, g, or t
  misc_feature (3339)..(3341): n is a, c, g, or t
  misc_feature (3343)..(3344): n is a, c, g, or t
  misc_feature (3347)..(3347): n is a, c, g, or t
  misc_feature (3353)..(3353): n is a, c, g, or t
  misc_feature (3355)..(3355): n is a, c, g, or t
  misc_feature (3357)..(3357): n is a, c, g, or t
  misc_feature (3367)..(3367): n is a, c, g, or t
  misc_feature (3375)..(3376): n is a, c, g, or t
  misc_feature (3378)..(3379): n is a, c, g, or t
  misc_feature (3381)..(3381): n is a, c, g, or t
  misc_feature (3384)..(3384): n is a, c, g, or t
  misc_feature (3390)..(3390): n is a, c, g, or t
  misc_feature (3392)..(3393): n is a, c, g, or t
  misc_feature (3395)..(3395): n is a, c, g, or t
  misc_feature (3401)..(3401): n is a, c, g, or t
  misc_feature (3420)..(3420): n is a, c, g, or t
  misc_feature (3430)..(3436): n is a, c, g, or t
  misc_feature (3438)..(3439): n is a, c, g, or t
  misc_feature (3445)..(3453): n is a, c, g, or t
  misc_feature (3455)..(3458): n is a, c, g, or t
  misc_feature (3460)..(3460): n is a, c, g, or t
  misc_feature (3464)..(3464): n is a, c, g, or t
  misc_feature (3467)..(3467): n is a, c, g, or t
  misc_feature (3475)..(3475): n is a, c, g, or t
  misc_feature (3478)..(3478): n is a, c, g, or t
  misc_feature (3492)..(3493): n is a, c, g, or t
  misc_feature (3497)..(3497): n is a, c, g, or t
  misc_feature (3499)..(3500): n is a, c, g, or t
  misc_feature (3504)..(3504): n is a, c, g, or t
  misc_feature (3513)..(3513): n is a, c, g, or t
  misc_feature (3519)..(3519): n is a, c, g, or t
  misc_feature (3521)..(3521): n is a, c, g, or t
  misc_feature (3524)..(3524): n is a, c, g, or t
  misc_feature (3526)..(3526): n is a, c, g, or t
  misc_feature (3531)..(3531): n is a, c, g, or t
  misc_feature (3534)..(3534): n is a, c, g, or t
  misc_feature (3537)..(3537): n is a, c, g, or t
  misc_feature (3542)..(3542): n is a, c, g, or t
  misc_feature (3547)..(3547): n is a, c, g, or t
  misc_feature (3551)..(3552): n is a, c, g, or t
  misc_feature (3554)..(3554): n is a, c, g, or t
  misc_feature (3560)..(3561): n is a, c, g, or t
  misc_feature (3566)..(3566): n is a, c, g, or t
  misc_feature (3571)..(3573): n is a, c, g, or t
  misc_feature (3575)..(3575): n is a, c, g, or t
  misc_feature (3577)..(3577): n is a, c, g, or t
  misc_feature (3579)..(3579): n is a, c, g, or t
  misc_feature (3581)..(3581): n is a, c, g, or t
  misc_feature (3583)..(3583): n is a, c, g, or t
  misc_feature (3589)..(3591): n is a, c, g, or t
  misc_feature (3593)..(3594): n is a, c, g, or t
  misc_feature (3597)..(3597): n is a, c, g, or t
  misc_feature (3600)..(3601): n is a, c, g, or t
  misc_feature (3606)..(3606): n is a, c, g, or t
  misc_feature (3608)..(3608): n is a, c, g, or t
  misc_feature (3614)..(3614): n is a, c, g, or t
  misc_feature (3616)..(3616): n is a, c, g, or t
  misc_feature (3622)..(3622): n is a, c, g, or t
  misc_feature (3626)..(3626): n is a, c, g, or t
  misc_feature (3631)..(3631): n is a, c, g, or t
  misc_feature (3633)..(3634): n is a, c, g, or t
  misc_feature (3648)..(3648): n is a, c, g, or t
  misc_feature (3650)..(3651): n is a, c, g, or t
  misc_feature (3664)..(3664): n is a, c, g, or t
  misc_feature (3683)..(3683): n is a, c, g, or t
  misc_feature (3689)..(3689): n is a, c, g, or t
  misc_feature (3691)..(3693): n is a, c, g, or t
  misc_feature (3696)..(3696): n is a, c, g, or t
  misc_feature (3702)..(3702): n is a, c, g, or t
  misc_feature (3707)..(3707): n is a, c, g, or t
  misc_feature (3709)..(3709): n is a, c, g, or t
  misc_feature (3715)..(3715): n is a, c, g, or t
  misc_feature (3724)..(3724): n is a, c, g, or t
  misc_feature (3726)..(3726): n is a, c, g, or t
  misc_feature (3728)..(3731): n is a, c, g, or t
  misc_feature (3738)..(3738): n is a, c, g, or t
  misc_feature (3742)..(3743): n is a, c, g, or t
  misc_feature (3753)..(3753): n is a, c, g, or t
  misc_feature (3756)..(3756): n is a, c, g, or t
  misc_feature (3764)..(3764): n is a, c, g, or t
  misc_feature (3766)..(3766): n is a, c, g, or t
  misc_feature (3769)..(3772): n is a, c, g, or t
  misc_feature (3777)..(3777): n is a, c, g, or t
  misc_feature (3782)..(3782): n is a, c, g, or t
  misc_feature (3784)..(3784): n is a, c, g, or t
agcgactcgtttctcgtctctgcgctgcgagcgaggctcctgctcctcgcggtctcgcttccctccaagttccaatccagcaccgggcgccaccgctaatcagtgctgatatatgaaccccgcatttggacatttggtggtggcaaggcaacgccaaccttccctgttgctgctttgaatgttctggtggttgtcggatggatcgccgcagttggctctggaagcgcaagtcattggataagagccctggggagagcgatagctctggctctgcttcatcacactctgagccttccttcgatgatcaggaacctaaacctgtgtctagtaattcttctccaaatcatagtcattcgcctgatgtttcttctagaataatttataatgagaatcaagaagctgaaagagcagaatcattgaatgagaagctggtgttagcaactagctcgaatgattcttctccacaacatgatcaatcgatgaagccagatatataccaatcacctctgctattcccaaatatcaggaatgatgatgttccagattctgtaaagaatttgaatgagaaggtgtccccaaagtttaaggtcgatgatgtccaggattctgtaaagagtttgaatgagaaactttctgctgcccttttgactatcaatgataaagatgacttggtaaagcagcacactagagttgcagaagaggctgttgcaggttgggaacaagctgaagctgaagttgcttctctgaagcaactacttgaaactgcatcaaagaagaatacctctctggaggatcaggtcagccacctagatgacgcccttaaagaatgtgtaaggcagcttcgccaagcacgtgaagaacaagagaataaaatccatgagacagttgctaagaagtctaaagaattggagtctgagaagtttgagctccagcaccatattgctgaactcagtaagcagttgcaagccacgaaactagaagctactacggtgcgtgtccagcgtgatctgcaggaaaagcttcagatagtggagaaagaaaacaaagacctcaaggtagaattactcgcactgtccaaggacctgaagatacttgcacgggaaagagacctgagcaaccaagcagcagaaacagcaagcaaacttcacctggaaagtgtgaaaaagataacaagagttgaggcagaatgccttaagttgcgtcatttaacgcggcgtacgtccttgaccaatgattcaaggctgataactaacagtgcttgcatggaatctcagactgacagtcagtctgacagtggggagcacatgctagttgatgagatgaaaaattctgattcatgggcaacagctctgatagctgaacttgatcagttcaagaatgccaacaacgacacaagaaatcttgtgaataattcggttgaaattgacctgatggatgatttcctcgagatggaaaagctggctgcactgcctgaagtagactgtgtaagctctagctttggagctgaaactgattctgaccaaggtgtgagtagagataaatcatcaaaagttaaaactgaaccattgcagtgtcaggtgacagatttgcacgcaaagatcgagaagattgaaggtgagaaaagggagcttgaaatggcccttgcagatgccagagttcagcttggcacatcatgtgatgctctaatggtggccaacaacaggttgattgatttgcagatgcagttggacttggcaaatgagtccaaacatgctgctttcggagaagctgagcgactgaatggtgagaggaaagatttggcattgcaactggagtccaggtcttcacaagttgatgagcttcagctgatggtggcatcgctggaaaagaatgtagacaggaaggtgttggaattgcagttagagttagtttctgtggaggctgcagatctgcgcaagacagtggcttccctggaagagaagattgatgcagagataactctctctatgcagcacaaaacaaatgcagacctggcagaggcgtccaaagaatcattagaggcgcagctgcagtctgcaaacacagagatagggaaactgaacgggattgtgcaaactttagagaatgaggtgaggaaagagacagattctcgtgaagaactactgaaacagatagaggctatgaaaattgagtcagagagatcactatctgtggtgtctaccaaagagtcattagaggtgcagctccaggtggcgaattcagaagttgcaaagttgcgtgggatggtgaatgctctggagtgtgatgcggcgaacgagaaggcatattcttcagatctccagatgcaacttgaggcagtggaaggtatcaggaaggtgttggaatctgagcttgagtcttcacaccaggaggtgatgaggctgaaggagaaagtttcgtccttggaagcaaggatcaaggaccagacctcgttgcttgtagaatatacagctaaatcagaggatgcagtgtcccggaaaaaggcaatggagggtcaactagaagcagcaaatctggaagttacaaaactgagaaacaaggtgagcctgatacaaggcaaggtggagcaggagaagcttctgtcagaagagtacgaagcaaaatgccgcaagctggaggcgcaggtgttgagggacagccgagaggcgaaactttggcgcctcacgaactcaaacggagacctgaaggtgaagcaggagaaagaactagtcagtgctgccgggaagcttgcggagtgccagaagactattgctaaccttggccgccagctgaaatcgctaacagatcttgatggcgtggtggccgatcctgaaaagctggaatcgagggacacgcacctggacttcagagatggcggagacgtggctgatggactgtatgaactgggtcttcctaagaggaacggtagctgcctctcaccccttcggtcggatccgtcgccgaggggtttgccgtcccttagtagctacctgagcaaaacaaaaaggtgaaaagtctgatgggatcattcaccattgtgcttgtgcataaattatttgacagtctatggatgatgccagttgtgacctggtggtagatcggtgtacatttacagaacttgatggttgctcacatgtgtactttctccttttgttgtgctctcattttgcgagacaaaaaaaaaaaaaaaaaaaaaaaaaaaaaaaaaaaaggaaaaaaaagnanaaaaaannaaaaaaaaataaaaanaaannanaagaaaatanaanaaaatagtntaataaaaaanataantgnntggnatacnnatnntatantgnnnanngattntggtnnngntannntnnttnatatcntncnggggggggcngaacacanncnncncantatgtntnntntaatanatatacgcgtgggcggttntataaaatgnnnnnnngnnaaaatnnnnnnnnngnnnnanaatnagngtgtatanaanaaattatatatttnnaatntnnggtnaataaaaanataggncncantnttgtnttnacnataanattgntccnncnttatgnntgatntggannntntncncncntatatnnngnnaanaannggaananatgtgngnaaaaantgantattnanngacacagagcggananntgtgagcgcgttnatatatataaaataaaaanagtggntnnntgngtgtgnggtgnanacagtnaaaaaagtncncnnnnaaaaaanatannatattatacntgngtgagtgngnatnnnngtaanggcantnaatg

SEQ ID NO: 5390 - DNA, 1659 bp, Zea mays
  misc_feature (1650)..(1650): n is a, c, g, or t
ggtacccccgcgggccggccaaccaactcgactcatcgagttccacagctctcgcgtcgcgcgcagccaatccctctccctccggcctacacagcccagaactcccttctccatctctctctctcgtccgtgtcgccccctgtttgtgtacaaccccatggcgacccacgccggcgagaacggcagcgggcacgcgaacggcggcgggcacgcggagtggcggttcgcgcgggcggcgaaggagggcgcgctggccgtggcgggggacaagatgagcatccgggcggtgcggttcaagatcagcgcgagcctggacgcgcgcgacccgcggcccgtgctgccgctggcgcacggggacccctcggcgttcccggccttccgcaccgccgccgaggccgaggacgccgtggccgccgcgctccggaccggcaagttcaactgctaccccgccggcgtcggcctccccgaagcccgccgtgctctggcggagcacctgtcgagcgaccttccatacaagctgtcgagcgacgacatcttcgtcaccgccggaggcacgcaagccatcgaggtggtggtctcagtcctcgcgcagccgggcaccaacatactgctcccgaggccgggctatccgaactacgaggcgcgcgcagggctgcacaacctggaagtccgccggttcaatctgatccccgagagagggtgggagattgacatcgacggtctggagtcgatcgccgacaagaacaccaccgccatggtcatcataaaccccaacaacccttgcgggagtgtctacacccgtgagcatttggccaaggtcgcggaggtggcaaggaagcttggaatactggtcatcgctgatgaggtgtatggaaatctggtgtttggggacacccctttcgtccccatgggtgtctttggccacattgcccctgtgttgaccataggatcactgtccaagagatggatagtgcctgggtggcgacttggttgggtggccgtatgtgatcccaacaaggttctgcaagaaaccaagatcattgcatcgatcacaaacttccttaacgtttcaacagatccggcaacttttgttcagggagcgcttccccatattcttaagaacacaaaggaagattttttcaagaggatcattggtctgctagcggaaacatcagagatatgtttcagcggaataaaggacatcaagtgcatcacatgccctcacaagccagaaggttccatgtttgtcatggtgaaactaaatttgtatcttttggagagcatccatgatgatattgatttttgttgcaagctggcaaaagaagagtccgtgattttgtgtccagggagtgttttgggaatggaaaactggatccgtatcactttcgccattgattcatcttctcttcttgatggtcttgagaggctgaaatctttctgccaaaggcataagaagaagaatttgcttaatggccattaactatattcgacttcaaagttgttacccacttccatcgttttccactgtatcatcaacaaaagtgtaacattgaaatccctcagaagtaataaagttaatgtttacatatgaaaaaaaaaaaaaaaaaaaacagtgggggggccccggccccaattcccctatatagggtntttaaaaaa

SEQ ID NO: 5391 - DNA, 743 bp, Zea mays
cgatctcaaaggggcggcccccgaggccggccggggcgccggcgtctgtccataaaaccctaaaacctccggctgatcggttggtgttgaggcgagtggaagcttcgagttttttttttcttccttttggcttactgcgcaagaagaagggtaacaagaggacggcggcgatggcgaagaggctgctcccatctctgaaccgggtgctggttgagaagctggtgcagcccaagaagaccgccggcggcatcctcctcccggaaacatccaagcagctgaatgctgctaaagtggtggctgttggccctggtgagcgcgacaaggcaggcaatctgatcccagttgctctgaaggaaggtgacactgttctcctgccagagtatggtggaactgaagttaagcttgcagctgataaagagtacctcctcttcagagagcacgacattttgggcacacttgtggactaattcagagcatcagcaagcctgtcactagtcgttggttctagacttctagtgtgagatgcgtagtatcagattctgggatcaaaatccctaagaactctgaactgtcgtgatgtcatagattttgtgatgaaacatcataattgcctgcttcttgttgcaagcgaacttttgcgtttaaaatggttccctaatattgtgttcgccactcaaaacctggttgcaacgctctctagtttacgttggctggtgattggatttacaggatgtacttcttat

SEQ ID NO: 5392 - DNA, 2493 bp, Zea mays
gcacgagaccattacctagaacatcctaatcgaaaaactcagcacacacatcagatcgccacatctccgacaccaacccacctccctcctccccctctcgccgtcggccccgcccgtcagcctcggccgagtgcgtctgcctcgcactcccgcggcccctatagacagagcagccgctctagagcgggaggaaaggcgagcagaggagacagagatggggaagggaggaggagaagaggacggcgcggcggcggccgcgcgcgcggcggagcaggcgcgggagctgcaggacgcggcggctgcgctgctgacgcagacgcgggcggaggaggaggcgctgcgccgccgcgccgccgcgctgcagggggagctgcggcggctacgcgaggccgccgcggcgcacgcggacagcgacaaggttgaggaggacttggatcgagcagcgtgcctcatcgctgaaggtgacgttgcgtcgctgctcccgagcaagacgcaaggcgcttttctgaaaatgttcttgggaccagtaaatttgcgggcaacaaggaaggaggtgcagctcaaggtgaaggaggagtacaatagctacagggacagaactgccttgctgtttctttgttttccggtgattttgttgtttcttcgacaatggttatggaatggatgttttccagtattgccagttcagctataccaggcttggttattattcctgtataccagtttagctttgcgtgagaacatactgcgagttaatggaagtgatattcgtccttggtggatacttcatcactactgtgccatgctgatgtctcttgtaagtctcacatgggagataaaggggcaacctaattgtgcacgcaagcagagaggcgtggaacttttcctttgctgggccataatgcaaggatttgtcatgatgctgcagaatagatatcagcgtcaaagattatatactaggattgctttggggaaggctaaaagaatggatgttgtatggggagagactgctggtgttgaaggtcaattgttgctgttgtgccctctccttttcctcctgcagggattcgagggttatgttgggtttttacttctgcgcacagctcatactggcgttgtccctgagtggcaggttgtggtatgcgggatcctgctgatcgcgatggcaatcggtaactttgcaaacacagtggacaccctggtaaccaagtcccggttcaaggcgaagatgaagaaatccaagggcagacgggacctcgacacatgcccctcgccaacaggttcatcatcgccgatagattcagcgaccaccaaagcatgaacaaggccaagaggaaaaggtgcccgtgtttaacccgggtgtgttaccactgtaaagcattttagtgtttttttttcttggccgtcagctcgtaatcctgtccgtcgtctgtgtcgaagctcatactcgtgtaatcaatcatcaggcaagtaggctgctgatggttctaggctggaggtggccgagaataaacttgtggtgtttgtttatatacctgtaccctgaatgaacatcgagtgggctagggtggtgggcttaggactatgtaaggcttagcaaaattttccaagtatagttgtgagacaggcaggcatttgtcacaatgaatgaaacatgcgaagttgtatacacgttgtggcaatgtgttgctttgtatgttggttggtgcatgcttacgttgctctgaaataaaaaaaaaaaaaaaaattaaatgatggtgaagaaaaccagtagcaggttagaagatgcatggtactagcagcaggatgaggggtgacaatagggctagatgggtggatgccatggcagggaaggacgctgtggttgatcaccggctaacggctgacgagttagcatgggagaaagtttgggggataggataacatcacaaatacggcagctggaggaaggcaggtgtcacacccgaatttgccctttgccctgatttaagagtaaatctcatatgtgcgataattaaagattcgcacatacaatgacttacattcacatatacaatgactcaatacgctaattaaagattcacacattcaatgactaagaaatagataattcatcctcaatttaagttataacttgattagaggttgtttttagtcagagtataattatagaatcaaaatattacatcaattatatttagaaaagctaatcccataaccataggctatataaatatctacttataagaatatgtgttatcctatagataatgttgttactgcgtaataaatatatttatgaagtcaaatcggagttaaaacgtaggagttatgaatttcctaatgttctagaattatttttatattataaatgattatcaaccctatttacctatttcttttatctgtaaatggacgacggtgctgcagtgttttcacgtcgccggtgagcaaatcgccgcaccacggtcaccctcttagctcggctaacaa

SEQ ID NO: 5393 - DNA, 4358 bp, Zea mays
  misc_feature (3781)..(3781): n is a, c, g, or t
  misc_feature (4236)..(4236): n is a, c, g, or t
gcaccgcgcggccgcccggtctctctcgcccttctcccgtctccgctccgcctccgcgcgtccggcgagaccgcgagagcgagacgatgggaatgctacaaattccccttctgagtccgaccctcctcatccaatagtaccacctgctcgctgctccgccaccgctctcgctcgatcgcccccctcgttcgtcggccttcgcttccagacctccgagtcctcaatctgcagctttggtaattggtcgtatagtccctcatcatcggaatggtggggtcacttatctttcccacacctaatgtggatccgaaggcagagaatcctaatgagatggttacagctggtgtgctttcaagccttcagaatttcctacgcaagtgcctcatagccatcctctcatatggcccaatgccgaagcacattgcatttattatggatggcaatcgtcgatatgctaaattcagaagcatgcaagaaggagcgggtcacaggatgggtttctctacccttattgcaagtctgatgtactgctatgaaatgggtgtgaagtacatcactgtctacgcattcagcatcgacaattttaaaagggacccaagtgaggtggaatccttgatgcagttaatggaggaaaaaatcaacgaactcttagagaaccgaagtgtaatcaacaagattaactgtaagatcaacttttggggtaacttggacttgttatatgagccggtgcggttggcggctgagaagctgatggcgagcacagctgggaacacagggctggtcttttctatctgcatgccatacaactcgacttctgagattgtcaatgctgtcagtgaagtctgtgcggaaaggatggaaatgtttcagagtgaacatattggcgactgcaatggtcatgctgcaaataacggtgtgcgatcagagatttcagtggcggatttggatcgccacatgtatagtgccggatgcccagatcctgatatcgtcatccggacttcgggcgagactcgattgagcaatttcctcctttggcagacaacgtttagtcacttgcagaatccagatcctctgtggcccgagttctctttcaggcaccttgtttgggctatcttgcagtatcagagagtttaccctgctctggagcataacagaaagttggctaagaagcagttgtgattccatgttacttgcaaggaggtatcatgaagggctattaacatcaaacttttccttctcaatttcctggtaatggtaaatgcaaagaagaacatactagcatataacattatgaatagatcaccatgtaacttaagtgtgattgctaccgtaaccatgtaacttatttgagctcgtacaaatgctgtgattcctacatatatacaaaaaaaaaaaaaaaatggggtaacatggtgtgcgagagcatttctttgttttgcacgacaaagaccggatgcttcaaagcgcccatgtttgacaagtgaaaagaaaggagttcgaagtaaaacaataggccaatgtctgttttccatagtccaataagtagaccactgataatgtctgttgatcatattttgcatccagccaagtagaccactgaaaaccaaggtcatgcacgtacagaaatatatatgcaagtttaacgtctgatggctatctacttggctctggatacatcaaaggtccatttaaccaaacgctgcctgatcctgaggttagttaggggaccggcacgccaaaaaatcttatctgccacgagctaattactgagctccgccgccgtccgccggcacgacgagctgctccgggtcgaggtgcgggtacctgcgcagcacggctcgcttcatatcatccattcccttctcgtacccggccaacgcgtgctccgcgaaccggaccacctgctccgtggagccccggaagtcgcgcacggcagcctccctggcgcccctcaccccctccgcagccgccttcttcgcgccggcgagctcggccttggcctgcgacagctcccgccgcagcgcgtccgcctcgcgctcccttgccgcgagcttatcctcgagctccagcgcgtagcccagcgagaacgacgcgtagttcgcggcctgcgcggtgcgtcgcccacgaccagggcatgagagctagttggttagaacgagacacgcacgaacgaggcgtcacgtcactgtctagagcggaagcgaacctgtagcgctgtcgtgtagctcgaggcgatgacgtcggagggcttcgccaccgagaacgtctgctccagcgccggcgtgacgatgctctgtagcatccgccgcgcccgctcccagtcggaggtggcgccgccgtcaggctcacgggtaaccttcggtgacttgtgcgcggagaagaagcccggaggggaataatgcggtggctcggggcgcggcggatcctgtttcgtggcatcctccaccaccttcctctttttgcaggacgacggcgtatcgctgctgggctcagtcttcaccgtcactcccgacgcctgcgcggcctttgccgcccgcagattcttcatcatgtcgtagacgcaagggtccattcctgtcacgcatccacagcaatagcaccttaccttaccttaccttgttttacaaaccaagtgatgggagattgggagttccgggcgtgctcgagttacctttggcactagcactgcttgtagtaccaatcggcggcggcggcggcttcgctgatgaaccagcaatcgttgcagcagcaagattgctctcggaaagatacgtcatgatatcgactgccgcaccgtgaacacggagcagcttcttggccacgctctgctcctctctggtgagcgccggctcaacagtggagcccatggacagcccgccccacttcacggggcacggccacggcgtcggcgacttgaggaagaagaaggcctccttccacccagcaatggaaagcggcatccccttgaagagcaagccggcggcgtccttgccacggaagtagtaccaccccttgagcttgaacgcgcacagtgagaagaagtgccggaacacggggagagacggggccacgccggcggagtgggagaggacgacgaagccggccatggcgcgccacccgttgggcgcgatctggctcggcgcgacgccgaagtgggcgagcacctcgcagaagaagccgtgcagcgggacgcgcatgccggcctccagcgcgtgcgcgtacacggagacggcggacccggggggcgaacacgcgcgctggtggccggcggggaggaccgccgagtactgctccggtactccatacttcctgcagagggcgtcaatggacccttgggtttcgaaggacgatgcgaagcgctctgccactaaccccgagagcgcgccgccgctgctgccgtcctcgtccatgtcaccgacctcgatgatggggtcgtcacggagacgcgaggagtcgccaatgatgtagagggaggaagacgaggacgaagaagcagaaggcatcgcgcatcgttcgttgaggtgctgtgctggtgcacaacaacaatgtcagcaggattgtggaagagaggacaggattagggactgaaattgaagcggctaaaatctttaaatagcaatactttgtttagacgtagacattagagtatagaatcagggaactgaaattagctttccaaaatttctattgtttggttatacatgaaattaagatttggaatcagagaactaattccacggaattgtactataactagaaactctatatttcaatatagagnatcactcatctgtattgcgtggaattagaccacacaatttcaaacttcaattcattggcatctaaataatataattagaattacatctcatttgaatatcaaggctgatcctttaatatcgactttcaaacgaagcataagggaattttagcccctccattctatcatgtatatttgctactaaagaagctattgtcggtgttcggccgacgatggtagatatgtgcctcctaggattcctttctacacacatgtttggactcgatttgcaaaatgcctctttctgagttaagttagatggtctaaatagcactcctgatgttctaaatttaaatttcagtgaaagagaacagatttcaagtcagttctcgtagttatgtacacacgagatagaatggcctatgaaccggatcttcgtgtacaaattaggagggtcggttttcataacctttctngtttagagttccgattgaggtttttcataccgagggacgatctttccccgaccggcctagtttttttgtttaggatcgatttaatactagaaatcaaatactattcggtatggctccactca

SEQ ID NO: 5394 - DNA, 5972 bp, Zea mays
  misc_feature (2665)..(2665): n is a, c, g, or t
  misc_feature (5144)..(5144): n is a, c, g, or t
  misc_feature (5469)..(5469): n is a, c, g, or t
gcacgagaccattacctagaacatcctaatcgaaaaaatccaacccagtccacacgagacgaaacgagccgagcccatccctccgtcgccttcgccaaccctagcctagcctccttcttctcctcctcccgcggatccaacctccgcccgcccgcccgccgccgccgagagagccctatctcccccacgccgcggtctccgcgcaagcgggggcaggggacgcggatcccgcagctccccgccatctccggaacggccatggaggtggcggcggctgccgcagggaagccgctgacgccggaggaggaggcactccggcgcagcaccgactgcgtctacttcctcgcctcgccgctcacctgcaagaagggtaatgaatgcgattttcgtcacagtgagggtgctaggatgaaccctagggactgttggtactggttgaatggcagttgtttgaatcccaagtgtgcatttcgccatccgccaattgatggtctctttggtgccccaacttctggactacctccagtttctgcgcactacggtgcctataacttgggcaagcagatggtcccatgctattacttccagaaagggaactgcttgaagggtgatagatgccctttctatcatggaccacaaacagctagtaatgatcttgcagagcaagcggcgaaggtttcttcctttcctttggaaccgtcccaggctcaaaataacgaagaggctgtagctccaaataattcaacgcagcaagaggcccgaatgactgaaaacaggacttcgattcatgtttccaagagtggtgtgggtgcaactcccgctgatgtagcttccaatgcattgaagcctgggaccaacttcgagcaggcacccagtaatacgcttgcagcaaagaaaagttccacaactgaggatcatcctatgcactatcagaaccaggttcctgtggagatcgatcctgtcaaagactggaaccaaaattttgaagtgtctcctactgattacctgccacaggatagtagggaggctgatgatattttgggggagtcctctcctggttttgatgttcttgtagacaatgatgtagatgttgctgaagattttgcaagggatatgtacccggtagaagattacgagtatgttacatctgattttgatgctcgggcccatcatgaaagtgagcagttcaacgatggaatgggtgtgaatggacggattggacagtatgatggctatgagaggaaacgccgtagatcttcatctgagaggaacctagacagacattaccatccagatggaaggtttcttcacagagagcttgatcgtggcgagatagatggatcagatctacgccatcagctccgcaggagaagaataaatgggccctcaacaaccattagcccagaacgggctaatggggaccgacatgggagggatgaaccctacagagaaagggcacatggtggtcaccacacgtacagagatcgctatcagggcccacgaggaagcaatctaagttcccgtctgcaggccagaataaagcttcctcgaagatcacctgatagagttgatactcgcttcgaggatgagcgagacaggagaagattcagggataggttttctccaatgaggcgtatggatttccatggtggtaggcatcaagaggctggacataatcaagaaaggggccacaggaagttaagcgagcttgtctctactgtcaggcatgcagatggcctctctgctagaagagatgcagtgggttcaactcattttgctgctcgcagaaacttgggagagccaaggaaggcaaatggtcttgtggaatccgaagcatctcttgattttgagggcccaaaaccccttagtgtcatcttacagagaaaaagggaggcagcacagggcaataactatgagaaatttgctgaggttgcagtcacgcagacaggttctctggatgaaactgagaagaaaagctgtgacaacgttaccaggtttgcagattgcaagagtggttcaggtgacgaagagtataaagagcaagatcatatccttgtggatgcacacaggcagtcttcggatcatggtgataagtttgaggctgggtatgctgctgaagtggatgcagaaggaaaacaagaggcagatgactatgaccagagagagggcgagtccgacgactacgagacatttgaaggccatgactacaaatctgaagatgaaaatgtgtaccaagacgacgaggatttcgatgataatgatgactttgctcggaaagtaggggttttattgccttagacgccgcggtgtcattggttctgttgcttgaggcaacgagctctagtttttgccatcggttctgttgcttgaggcaaagctgaaatgccgatcataatcgatttgaggtttacatgtaaactgctgtgtgatgttcagcacatctgacctctcctcggactttgttgtattagtttccgtactaacagcaggatatattccttaatcaatttgtgcccggaatgaaatataatcaactccacaatgggggggcgttttgcttaaaaaaaaaaaaaaaaacgcgggcccggtatgcatgtattttggccttatgctttgagataccatggttgttgttgcctagtcgtgtgggtttgctgcaaaatcnaagtgatatatatgtgtttatggtacttgttgaaaatgaaatcgtgtgctggagttggatacaggtgaatgcaacaggagctcaagagatgcctccccagtgcaacgtgatctgggttgctgacgaccgaaaacaaaattacaatattgattgctgacgagtgaaattattgcactgaacactgtaaattcatcgttcagttaccaatgaaaatattctcagaaaaatgaagagaaaacaagacggtatgcatgttttcttttttttttcttttggcgtggaagcgttccgttggttagggttagttattatgtatgtatgtatgtgagatgagttggacaaatgaagtttgtgtagaaaacttgtttattagactgacagtgtaccgctcaagggtctcttcgtctatcactgtagaaaatgttgttgtcctctggaatctctccttgtacgtccaactaaacacacccttaattcgatggaatcgatccaaaaggcttgtccctgaccatattagagatgataatggatcacgatctaaatatttatcctcaaaatggtagggtaataaataaattttagtttaaaaataaataaaaatagaacatgatcatatccttaaatcttatagcgtaaaatttagatctcgtataaagaccagttcatggccgccacgctacgttgtcagtcctgactcctgagtgcgaggcggttagtattggtttaggtcgacggcaggtaaagcagctgggcacgtaggaccccgatgggaaaaccggaaaaagggtcaccaaaaacacaagaagacgccggccgctttccggtcacgccaatgtcatcatacggcacttactagctactaggctaggtagtagctactaagccatgattgataaccactcagcaactggcgtgcgaatgcgcaatgcgacgcaacgcaacgcaacgcctctgcctctcctctagtctggttcggccgccgtgcatgtgcatcctgctgttgtgctctgtcctttaaattcacgcaggccaatcatgtggcaagttgctagacgccaatggcctatttgctatcgcctatatatcgttgtatagaatagaaatgcatgggtcgtcggagtactcctagctggctggaacatgcatgcacatcctggctctttggctagctatctatcgctgtgactgtgaagatactactcactctgatacacgtgctagctgacagtgatgcatgagatattattattcagatggaccatgctacgtgctgctagccgcctgagagcaacagggacggcaagctatagatagggcggcacgatggatggggatgcattttgcatggtgcacgcatatggtccagacggatcatgcatgtctcactctcacagtcaactagagagagaaatacatgattttttttaaagaaagttttgaacacagcacctcttcctcaaataaaatcctttttgaagttgagcaaagtttgtatccaaacacgtcacgggtcctcgcccgctgctagtggcagtaccctgtatccctcatgtgtgcatatcaacagtagtgaccgtgcaaagagaagtagcaaccggccggttggtttgggagtggtggcctcgatcgactcttcttaaaagggtctcggatcggtctaatcatgtagagcaggttctttggtaaaaactcaaaccgttttaaagaaatatttgacaaaaaaaaacagttctaatgctagttttattattgtagtctatgtcaagttcccgagaaaggaccagaaaaaagacatgcctttacccaccaattctataaaaggcgaggaaatctgcatagtggacgcctggaccgacgcggacgccgccggctcgcctttgcgaaaaagcccaaaaggattctctgcctctacgatgaatctcatcgggagcacaaaaatctgtatccaaatcctaaagagctcgcttttatagcgaaaagttttctttttttttctttttacaaatccacaactcgtaaaaggttgtgcagatcacacagaagcatgcttagattttgggactttgttcaaattgggaaggaaaaaaaaagttacgcgtagatttatgtaaaagcaactaaagaagatttatcgcgtacgtatgaggtcctaattactgacatgaaatgagatgttcacaatcacatgcgagggttgggttccggtggggagggagatcgaaatcccggcggcacgcggcgaggtgggcaacactaaaatacgaggtacagtactagcttttggttgtttgtgttattaagcttctgcactaaaacgacacgggctatctctctcgcgtcaaataaacaactgctacgtggcggagttagaggcgtgtttgatttctaaggactaaaatttagtatctccattttattacgttttaatccttaaatttaacaaacctgtatttatagaataaaatagagaactaaaaantagttcttataaaccaaacaaacccctcacagttagcctgtactgacagataagtatcgtctaatatgtcaggtcgtctgaagaactagatcgagcgcgggcccaaggaacctaataattggatgccttttggggtcctccatcaaacaaagggggataggatggtcacaggttccgagatctttttcgtgagcgccgtggcgtagtacgtggaattcgctcgccgccgagctagctttctataattactccattttggtaatggggcttaattatgatttgtacaatcgcaatctactttttcaaagaacgtttggttccttancgccgctgctgctggtgcacctcccctcgctcgctccaagatatgttgtgggtgcctagcgggtggccggcctagctctacgatgaccatcacgatcgagttcacaaaccggtgaacatttgttattggtatgtgctatttagccaaggaaaaatcacggtgtctttataattacgtaaaaaaaatacaagctaagcacgatgtttggtaacaatcacaagaaaaaatcacaaggcgcagctctagaaaatcaggaaaaaaaaacagagaatttgcttactatgaacaaattaatatagacttttatcttccacactctctcaacctgaacgcagagatgtcaggttgagattgcgcgctgaaattggtgaatggaagagccgagagagtgacttgttcagtgcattggcaggttgaaattgttgattggagcgcctgaaatcgtttggcccatagaagagttaatttcttgctgtaagtttcggacgaccaccgaaacgacg

SEQ ID NO: 5395 - DNA, 1421 bp, Zea mays
atgttttttttttccaggaacatcccttccagcaacttttataccttcagcagagcaatagcactcacgagtcacgacacagttgctagcacaaaagatgcaacttccagcagaggtcaacaaataagtcactagagctcaccggtggtgctgcaatagaatcagctacacacaactagctcaaccaatgtacaaaagaactgaatacctaaattgccaaaatcacaaatctggactcctaaactagatagctataaaagctactggaagagttcaatatggatctaagctatatcagtaagcacaaagcccttccacactgaattgctaagctgtacataggagatagagcaccgctgcttcaccgccgcgacaatctgggtcagaacctcaaactgtatttgttcttttcccagtaagaatacgggatatctggaggcccctgctaaaaccttcattgaaaagtacccttgtctgcatttcttgaaatcccggcaaccaggacagcaatgcaactggtgccataatgaacactccaagcagtatctcatacaaacgagccacagaaataatactgtcccagaccacagtggattcgatgaatggccgaattacttgagcgatcgaaatcaagccccaaccagtaggaataaatgccaaaagactagtgaagatgtcaatgatttgaaattccgtgaacttcagaaacaaaaccagcactagcactacaagagtgatgacagcagtttgaacaacccggtagtaaaggtgctgctttgcggcatacttgtctcgagcataggacattagcacgaacagaccaaaaatcacagccacacatatccaggaaagcagatagacagcaatacttctgctattgtttgctatcttcagctggtatacaaccccatactggaaaaagaagtacctgagatctaacagtatctccaaaatctttccccaaagaccagtggtccgtagatgatcttgctcttcataccaccacacttcccagctctgctcaggcttagaaaagagaccaccaggataccatatccagttcatgaaatcatcaaaatcgtacactgttttcaaccaatcaaaaccagacggattaaaagcaaatggagccataatccatgataccaccagaaaccagctagatatattcataattatgtaaacaagtgtattcttggcaataacactgtgtgcagcatacacagtcaatattattccaagctctattgcctttatgaagtggctcctagcatacagcctgtaattttcagcaaaactcttgtgctgcacaacaaaaccacggccagtagcacggtattttgcaccaccatgaaggattgtccggccatagtaatggctcttgttcccatgaaaatggtagaacacagataaaattcccg

SEQ ID NO: 5396 - DNA, 1417 bp, Zea mays
  misc_feature (3)..(3): n is a, c, g, or t
ccncccgccgggagttgtcacgccccaaagaccggcaccccgccgggtccgaggggcatcgcggcatcggcatcgccacaaagcccatctcacagccccgcagcctcttctcctcgtccatctcttccgcctccctccccgcgccgccgttcgccgaagccccgcgtcgcgtcgcgtagagtgcttgatggctgccgcaaggggcattaaccagcttctgaagagaattctccacaaccagtccgctggtccatggctgctttcttcatttcggggaaatcatgaagagtcctctgctggattgagagcattggcgcttcttggagttggtgcctccggtcttttgagttttgctacaatagcatctgctgatgaagctgagcacggtttggcagccccagattatccatggccacatgctggcatcatgagctcttatgatcatgcatcaattcgccgagggcatcaagtttacacacaagtttgtgcttcttgtcactccatgtccttgatttcataccgtgatttggttggggtggcctatactgaggaggaaacaaaggcaatggctgctgagattgaggtcgttgatggtcctaatgatgagggtgaaatgttcacccgccctggtaaactcagcgatcgctttccacagccttatgcaaatgagcaagcagcccgatttgctaatggtggcgcctacccgccggaccttagtcttatcacaaaggcaaggcacaatggtcagaactatgttttcgctcttcttactggataccgtgatccacctgctggtgttcagattcgtgagggtctgcactacaacccctacttccctggtggtgccatagccatgcccaagatgctcaatgatggagctgttgagtatgaggatggtactcctgcaactgaagcccagatgggtaaggatgttgtatcattcctttcatgggcagctgagcctgagatggaagagagaaagctgatgggagtgaaatggatctttctactatcactagcgcttcttcaagctgcatactaccgccgcatgaggtggtcagtcttgaagtcccgtaagctggtcctggatgttgtcaactgaggactaccattacccttttttatatttaaatatgagctgttaaggagtattcaaaataatgaatttgtgatgtacaattttgccactgggggctaggttccatgcctagagattattttgttttctttactctgctgagctgcaaaagcatttcaccaacgggtacatttcacgttttttttggtttgcaatgcctcgatgttatcagcaaccttgtaacttaacagctgatgagagttgataaattcttgtgctatgaaatacacctatcgtatgtcttggtctaaacaagagactatttctctctcctcgtgc

SEQ ID NO: 5397 - DNA, 769 bp, Zea mays
ccggccggctacctcgccacgtctttcgccgggttcttgcccgaattccccagggtccacttcgctcgcaaccttccccagccatggcgaccgcgacgcggaggctgctccccgcgctcctcaagaccctagctccagccggcgcgcgcggcctctccaccgagaaggctgttggtgcagccgccgtcgtcggcagccacaccgctaagtggatgcaggacacgagcaagaagtcgccaatggaactgatcaacgaggtacctccgatcaaggttgatggtcgcattgccgtctgtgaaggggcttctgaaggtgttggacttggccacccaatcgagtacatctgccttgatctggaggcacctaatgtgtgcaagtactgtggtctccgttatgttcaagttcaccatcactaaattgggaagatactgccgtctaccgctgcagaagctgagttgaggagtttatgtgcacacacatttgttccacaatgttctgtagtgtactttgtactatgcttgcgggcaaaatattacctttgatgatcatcctcttctcgggcgatcttttattaatcctgtcttagtatggttcatttttctacagatgaattgtgctcctttttcagaatctatacaagctgtgtgtattgaagttttactctgaataagcatggaactaactctgagggcaatttaatctcagaagttctagttttctggagaaaaaaaaaaaaaaagttgcccaatcccggcgccagctttttgtt

SEQ ID NO: 5398 - DNA, 1155 bp, Zea mays
aggaaaaattttatcacaactatatctacaaatcaaacacacatctaaaccagttaaccacaaaaactttggtagcgtggtcgcgccagggccggccggggacttgtgcgccatcacacacaagacacaaccccactcacccggcagggaggccctcttcgtcggcggaggccatggtttccctcaagccgcagaagaggctcgccgcgggagtcctaaaatgtggcaaggggaaggtgtggcttgaccccaacgaggtctacgagatctcgatggctaactcgcgtcagaacattcgtaagctggtgaaggatggattcataattaagaagccacagaaaatccactcaaggtcccgggcaaggagggcccatgaggccaagcagaaggggaggcactctggttacggtaagcgcaggggtaccagggaggctaggctccccaccaagatcctttggatgcgcaggatgcgtgtcctcaggcgtctgctgcgcaagtatcgtgaagcaaagaaaatcgacaaacacatgtaccacgatatgtatatgaaagtaaaaggaaacatgtttaaaaataagagggtactcatggagagcatccacaagtcaaaggccgagaaggccagagagaagactctctcggatcagtttgaggccaagcgagccaagagcaaggcttcccgtgagagaaagattgcaaggagggaggagagattggctcagggcccaagggaacctgcggcagcaccagtatcagctactgctccgtttgcagctgcaccaaagaaggcgaagaagtgaaaaaggtggtcttctagttctaggacctaattttggagcgccccaactcttttgctgttacatatccaagctgtcagatatctgtaataacatcttatctcgtttttcatgttggacaatgtagtaaagttgtttgtcccaagtgtatttggaacgaattttcacagaatctgcttaatgcttcggtggaacccagttctggttttgctattttaccttgtagatctggccgctgtggctagcctccgtgcttttttgcttcgatgttccataaccttgtctggtgttgacccgcgatgacgcaggttttgtagtgttctttggtgaattatgagctctgatgtgatattgataa

SEQ ID NO: 5399 - DNA, 2593 bp, Zea mays
tctctcataattcctctccggttcccccgcgtgatctgtctcgtgcggcaaggcgtacgcgtcctctcccgcccccgccaggccggccgccgccgtcgccctaagccaggtgcccaggtattcgtcggtcccttcgccaggcctccctcgcttgccgccaacgagcacccactagactgtagactacaattgcatcctgaagaataaaatggaccaacatgattccatggctgactcaccaaggaggcggcacaaccttttgcgtgacaaggtccaattggtgaaaaggaaggattcagatcgctatgagatcgtccgcttccatgatccactgtcttttgagaaaggcttctttgttgtgatccgtgcttgccagcttttggcacagcacaatgacgggataatatttgttggtgttgctggcccctctggtgctgggaagactgtgttcactgagaaggtggtcaatttcatgcctgatgttgctgtgatatcaatggacaactataatgacgcaactcgcatagtcgatggcaattttgatgatccacgtctgacagactatgacacactgctggaaaatatacatggtctgaaggaaggaaggtcagttcaggttccaatatatgatttcaagtcaagctgccggactggttatagaacagttgatgtccctagctcccgaattgttatcattgaaggtatttatgcactgagtgagaagttacggccagtgatagacttgcgtgtttctgtccactgggtggtgttcattttgacctagtcaagagggttttaagggatatacagcgagctggccaggagcctgaagaaataattcatcagatctctgaaacggtttatccaatgtacaaggctttcatcgaaccaggtttggagaccgcacatattaagatcatcaacaagttcaacccattttcagggttccaaaatcctatgtacattctaaagtcaccaaggtctctagggacctgagaaaatcaaggctgtgcttggtgatgatcatacggaaagcaacgaagaaacttatgatatatatctgcttccacctggtgaagacccagaagcatgccaatcttacttgagaatgcggaatagggaagggaaatataatctaatgtttgaggaatgggtgaccgacaattcttttatcatatcaccaaggatcacttttgaagtcagtgttcgtcttcttggtggtttgatggcattgggatatactatagcagctatactgaagagaagcactcgtgttttttctgatggcaaggcaactgttaaaattgattggctggaacaacttaacagacaatatatacaagtgcaaggaagagatcggctttatgttaaatctgtagcggatcagttaggtttggatggttcttacataccacgcacatatattgaacaaattcagctggagaaattgattaatgatgttatggcgttaccagaagatttgaagacaaagctcagcatcgacgatgagctggtctcaagtccaaaggaagcctttttcccgtgtttcggctgatcggagaaacaaacttatgaagagtgcacgagaccattacctagaacatcctaatcgaaaaaatattgtgaaattgagtaaactaacagaaaccaataggaggtttggtggagggcgggcccttgaaccgcctgctatcaaccagggtgcaatcacccagctttcagaacagatatcaacattgaatgaaaggatggatgagtttacctctcgagttgaagaactcaactcgaaatttacagtgaaaaaacatttgcccagtcagcagaacttagctcttccaaatgatgcttgcaatggttccacgcctacaaatctctttgtctctcatttaggcaatggtactctgatacctcattcttcatcatcaaaccaactttcaaaggattccccgatgatagaagagattatgaacataacaagaggtcagcgccaggttatacatcagctcgacaatctgacaaatctgcttcacgagcatttggtcttaacacgccagactaataataccgccagcaggaaccgggtgctggatagcgacacactcatctgtccacttatttgcctgactgttgccagtatcggttacttcatgtttaaaggtctcagtaggggctgaccaaagtgagttggcccaaacatgtgctccgaggctcaccaccaagttttggcagaactggagctaaaggaagacagttctcgcaccgtttacatcaggaagatcatatctaacagcttacggtcttattaagacaggtaaacccatataccagcacatggaacaaagctttcgcttttcagggagttattactcccaaacgcagaaaatggtgtaccagaagcatacacttctgtaacaggcactggcagttcccagtgccaataaattttggaggttaaaataatgctcagataatgtcgaagaaattatgagagatctataagtttaactgaacattgtcgttgtcggaaaaaaaaaaaaaaaaattgtctgtgtcgtgatttctgagtgcgagcactatctcatgatgccatctg

SEQ ID NO: 5400 - DNA, 991 bp, Zea mays
cccccctcccgttcccactgtcttgcgtggaaccagctgcgtgggcccccccgcaaggtcgaagcgtcgtctctctcggcacggagcctagtgcccggcctcgtgagatccgaaattcagaatcgaggatggcgacgaccgcgactaggcggtggtggaggcggcacgacggcggcgacgatgacccagacgacctcgtccccatggacacccaagagcaagaagagctggtccggtctctggaggctaagcaggcgcagcaaggccgccgttggaggcgcgtcttcgcggggttcctcctaggttacgcggccttccttgtctactccagtttccatcatgcttggtctccctgggagctgcggtaccatgcttacttcatggaagatttgcctgcaccaatggtcataattgcagattggatagctgctctagcatgcctatttgctgtgaaaggattactacagaattcaggcccatcaaagaagtggatgtggtattcttgctatgttggcattttggtagccatcttttggacatactacatcttgaggttgccaagaattcgatgggatgttgcatggctcccactcggtcctttgatggctggtgcattgagcctgtatgtggaccatgtgctgctggagtcaatgcaagatatcagcacattgagaagttacatgtataacttcaaggccttgtagttttgagcataatttcccttgcacctatatgcagctatatgtggaacaggttcaggtcatttctccttttttttagtggcagagttgcggtggtaccttgttaaatggtgtgttagcatgaatttttaacctcagagaatacttgtgcatcacttccgctctgtggcgggtgtatgtacaagctgtggtgccaataggcaccgcggctgtttgaaacacccccctgcttcagtgcttctactgatgtccatatttgttgtagaaattgatgatttttgagaggctta

SEQ ID NO: 5401 - DNA, 2401 bp, Zea mays
attttttttatatggagattatttctggtttatataaaaggacacaagtggggacgaagcagcagaagacttcccttcgtctgcttcccagagacccagccatggcgatctcccagatctcacgcatattcctggccatccttctcctggccgccgccttcgccgccgccccagctgcgcttgcggacggcgacgacgtggtggcccttaccgaatccacgttcgagaaggaggtcggaaaggaccgcggcgccctcgtcgagttctacgccccctggtgtggtcactgcaagaagcttgctcctgagtatgaaagacttggtgcaagttttaagaaagctaaatctgtcttgattgctaaggttgattgtgatgagcacaagagtttgtgcagcaagtatggagtttccgggtatccaacaatccaatggttcccgaaaggatccttggagcccaaaaagtatgaaggacaacgcactgcagaagcccttgctgaatttctcaatactgaaggaggcacaaatgtaaagctggcaaccattccttcaagtgttgtggttctcaccccagagacctttgactcaattgtccttgatgaaaccaaagatgtccttgttgagttctatgccccatggtgtggtcactgcaagagtcttgcaccgacgtatgagaaggtggcttctgttttcaagttggatgaaggagttgttattgctaaccttgacgctgacaaacacagggatttggctgagaagtatggagttagtggatttcctaccttgaagtttttcccaaagggaaacaaagctggtgaagattatgatggtgatagggacttggttgactttgtcaagttcattaacgagaagagtggtaccagccgtgacacaaagggtcaactaacctcagaggctggccgtatagcaagtctggatgtcctggctaaggagttccttggtgcttccggtgacaagcgaaaggaagtcctctccagtatggaggaggaggcagataagctcagtggttctgctgcaaggcatggaaaggtctatgtaaccatcgcaaagaagattctagagaaaggcaacgagtatactgagaaggaaaccaagaggcttgatcgcatcttggagaagtccatcagcccctccaaggccgacgagtttatcatcaagaagaacgttctttcgactttctcatcctaaggcatctgctagctccattttcacgtttcagatataggcgacaaaaactgcaggattataagtgtgataatgagagttaaatggtgctagaactaattttggggctttccctcgaggatatgtaatactcgtacgtcttgcgaattagttcttttccttgtgcttctggatttattccgtagcaccatagtttattttttggtttgacatggaggacattgtgactacagaactgagttttactatccaataacactgctcacttgatggggcttatgcgaaaaaaaaaaaaaaaaaaacaaacaaaaaaaaaaaaaaaaaaaaaaaaaaaaaaaaaagcggccaaaaaaaaaaaaaaaaaaaaaaaaaaaaaaaaaaaaaaaaaaaaaaaaaggggccccgccaaaaaaaaaaaacaaaaaaagggggagggcgtggcaactgacaaccccttgttggcgccccgacaaaatcgtttattgtccgcgttccccctccctgaaaggggggggaaaacgcccggccttccccccttttgtcccctgaagaaccgcccccctcccccatcgccaatggaaaacaaaacaaccctgccccctccaccgcgtcacaagagggggcccccccaaaagggaccgtgaaccccgcccgaccccgaattatgaccccggggggttgcgtttcttcacctccccctccccccccctttttttcccccccccaccccccccttcctctccttttttctccgtttccttccccccggtttgccggattttccccccctaaaaaacagattaaggggccctttcccccaaagagtttaattgatgtgggctccccccccccccccaaaatatttgttgatggaggtgtttaccacagggtcccctcctccaaaaaaggaatttatcttccctctctttgtgcagaaatagaaccttatttaaagcggtatttttgccaaaattgggacaaaaaaccaaaaaatttttctggattttttttttattttttaataaaagatgtttttcgccattacctcaccttttaaaaaaaaaaaattgcccttttttttcacaaaatttttatccgaaaaatctttatttttttgattaatccttttaaaaattgggggggatcaatttttttttttaggaaaaaaaaaaaaccacacctttttttttttttttttt

SEQ ID NO: 5402 - DNA, 2275 bp, Zea mays
cggccgggccgggtccctcgctgccggccgggccgggagctcccatcccagatcaggattagccgaccacccgccgaaggccagagagaaatatctcatcttctctccaccggatcggttcaatcgagagcgagggagaaagggaggtggtgcgtcgaggggggccgagattttgccggtttggagccagataggggtatgagctgcttcgcgcaccgccgccgctccgacgtcgcccgccgccaggacggcctcctcgtcttcgtcttcttcctctcgattcccatacgtaccagtagttttaatttaagtagtagtaattgtagtagcaatctcttgtaaactgcgctcgcctttgcgtgttcgtggtccttttgcgctttctcgtccctctttctctcaatctctccttattcttctccttccacggcgaagccggcggctggtatggatcccaatggcctcaaaactggaggccttttgctcccgaccatcgagaggcggtgcacgtcgcctccatccgtcattgtcatcggcggtggcatctcgggcgttgcagctgcccgtgccctctccaattcttcatttaaggtgactgttttggaatcgagagatcgtattggcgggcgcattcatactgataactcgtttggatgcccaattgatatgggagcctcatggctacacggcgtgtgcaatgagaatccactggcaccattgataagctatcttgggctgaggttataccgcacaagcgatgataactcagttctgtatgatcatgatttagaaagctatgctctctttgataaggatggtaatcaggtcccaaaggagacagtcgataaagttggagaaacattcgagagaattcttgaagagacggtgaaagtgcgcgatgagcaggaacacgacatgccactgctacaggcaatttctattgtgtttgagaggcacccccatctaaagcttgaagggctagatgatcaggtcttacaatggtgtgtctgccggcttgaggcatggtttgctgcagatgcagatgaaatatctctgaagaactgggatcaggagcgtgttcttactggtggacatggactgatggtaaatgggtactatcctgttattgaagctcttgctcaaggtcttgacatcaggcttaaccaaagggtcaccgaaattacccgccagcacaatggagtcaaggtcactactgaagatggcacaagctacttggccgacgcctgcataatctcagtgccactcggcgtgctcaaggcgaacgtaataaagttcgagcctgagctgccccagtggaagagctccgccatcgccgacctcggcgtgggcaccgagaacaagatcgccatgcacttcgacagggtcttttggcccaacgtcgaggtgctgggaatggtcgggccgacgcccaaagcctgtgggtacttcctgaacctgcacaaagccaccggcaatccggtcctcgtgtacatggccgccggaaggttcgcccaggaggtggagaagctgtcggacaaggaagccgtcggcctggtcgtttctcacctgaagaagatgctcccggatgccactgaaccgacgcagtacctggtgtcgcgatggggctccgaccccaactccctggggtcctactcgtgcgacctggtcgcgaagccggccgacgtgtgcgcgaggttcgccgcccccgtcgagaacctgcacttcgccggcgaggcggccagtgccgagcactcggggtccgtgcacggcgcctactcgtcgggcatcgccgctgccgaggaatgcaggaagcggctcctggcgctgaagggcatcccggacctggtccaggtcgcggcgtgggaggagatggccggagctgtggctcctctgcagatttgcaggacctgagtgagattggatcactggctgcctttggacattggagtggatcgtggatcgcttcgctgctccctgatggttgccgagtctttttttatatttaccttaccttgaaggccgttgtgtcttgtctggaataaatcaagattgactggcactgaaagtgtcatcgcgtcactctttcatacttattaataaatatcacaagtctgtcctgagatctcagcctggtgcctgcgtgctgcctttgccttgtatatgacgttttactttcttttagtctcaattattcaattttttttttcacaaaaaaaaaaaaaaaaaaaaaaaaaaaaaaaaaaaaaaaaaaaaactcgagggagggcgccggtac

SEQ ID NO: 5403 - DNA, 1232 bp, Zea mays
  misc_feature (1228)..(1228): n is a, c, g, or t
cccccccccaagctatagctagccagccatcctactgtcacacacacacacacacacagacaagtggtttccaaagccaagtgtgtgtactagcaaccagctagctcgggcggcagcaggcagccatcatgtcggaggagaagcaccaccacttcttcaaccaccacaagaaggacgaggagcagcccgccggcgagtacgggtactccgagaccgaggtggtcaccgccaccggccgagggcgagtacgagaggtacaagaaggaggagaaggagcacaagcacaagcagcacctcggcgaggccggcgccatcgccgccggcgccttcgcactcgtacgttcacaatgcatcacatccacaacggcgagggcgagtacgagaggtacaagaaggaggagaaggagcacaagcacaagcagcacctcggcgaggccggcgccatcgccgccggcgccttcgcactctacgagaagcacgaggcgaagaaggaccccgagcacgcgcacaggcacaagatcacggaggaggtcgctgccgcggcggccgtcggcgccggcggctacgtattccacgagcaccacgagaagaagaaggaccacaaggacgccgaggaggccagcggcgagaagaagcaccaccacctcttcggctgaccgtagtaccggccggcgcgcgaccgagctagctagctccggcgcacacaaccacacacctgtttaattctgtactgcatgcgtgtgtaatttgatggttcacaataatgagtccctctccggaccttggtagctgcttgcttgtggtgagtgagagtgtgagactgagggagaagaggtggtgggcgtggggctacgtcgagagaggcgtgttcctgtaatcctgtactcgcttcgttttctctgcatgcgtctataattgtgttcaataataagtgagagcggtgtgatgtgtggctccccttgtcaggcctcatgtttatccgtattgaatcctggcaccatgcatgactgaggatctggatgtctatgaagcaccgtgtatctatcatcacttttgcaaaaaaaaatattcttatatttcttgaaaaaaaaaaaaaaaaaaaaaaaagccagttctccgcgttctttccactgcttactaagatattgtttggttcatatatttgtaacacgattgataactaataatattaaactatgtttgtttaaattcaactgtaatcatatancgcg

SEQ ID NO: 5404 - DNA, 1892 bp, Zea mays
cctcgaggccggccaccctttttcgtctctcctctgcctttccccatcgtctctccgtctacacctcatcataatcacagattcacagagcgctagggaggagagagggctagggtttcgtgctccctcacgcaacgaatccgagccggatcggggggtgcgcggagtcaccggcggcccggcgttgcctgggctgtgatacagttgcaatggcatctgtaactgatgagacagctaagattgagggtttgacatctgctgcagcctttgtggagggtggcattcaggacgcatgtgatgatgcatgcagcatttgccttgaggctttctgtgagagtgacccttctgcattgactggctgcaaacatgagttccatctccaatgcattcttgaatggtgccagagaagttcacagtgcccaatgtgttggcagcctattactatgaaggatcctaccagtcaggagctgcttgaggcagtagagcgtgagaggaatataagaactaatcaaactcggaacacaactatatttcatcatcctgctcttggggattttgagctgcagcatctgcctgttggtaatgatgctgagcttgaagagcgtatactgcagcatctagctgctgctgctgcaatgggaagggcacaccatcttggaagaagggaggggcacaggggacgatctggctctcatggtcgtccacatttcctagttttctctacacaaccaaattcaccttctgctggcacaatctcttcatcttctgctcatatggagggagaaaatgattcaaatcctgccacacctagagctagcgagtcatctccacgagctattcgcattggagaagtgggaaaccaaagtcctgggatgcttacctacgatgctgaacaggatgctgtcgtttcttccggaaatagcactcctgtatcgagtcctaggttttttaacaggagacactccactggacagtcaactccagacagggctgggccatcggatattcagtctttctcagactccctgaagtcccgcttaaatgccgtctctatgaagtacaaagaatctattacaaagagtactcgagggtggaaggagagattgttttcacgtaattcatccgtggcggatcttggttctgaagtgagaagagaagttaatgctggaattgcgtccgtatcacggatgatggagcgtctggaaactagaggaaatagcagaacaagtgatagcccggcagcatccacttctgaagttccccctgctacagaatcaagcaatgaaagggttacagagagcaactctgctgctgctgctgctggtggtggtactaccactacgggtaccagcgctagcaacgcctccgccccttgtgttgcgacatccggttcaaattaggacatgtaagggtctcagaaagaaggcttacacctgcaattcttcatcttcaaaggtttgtgagcctggcggcagagcagaagtgcagtaacatgatgccgtcatttttttctcaaccactgcataaacggctgcaaggggaaaaaaaccaaacggtgatttgatgtattggctcgataaaatggtggtgcgtgtggcctaggagaagtcggatttcatcttctgttttcgtctctttgtaaaaaaaatcgtctgagggcagatgtttaccggtataaataacggatatgtcatcttcatagtacgtggatcagttataaatatgattggaacagcaaagcttgctgctgttataaagttgtaccgtggcacgatttcctgttctgttctgtgtgggtgaattgatggattttgctgtacacaagatatgcatctttccaggtctcatgcctatgtatacatatacatattacacgaacctaccttgaatcc

SEQ ID NO: 5405 - DNA, 1449 bp, Zea mays
  misc_feature (1433)..(1433): n is a, c, g, or t
atcagctgttccttactgggccgctcggcccgtattccctgctcgttcagtcgtcctcttcctccaaacctttccgctgccggtgaacttcctccacctgaagcccctaccacgataagccctaatcccagcgccacctcgatggcgaccacctctttctttcatccgctcgccgccccgatggaccgcggtagccgtttgttttcgtcgctgcccgttcagcctaaccatccccgcccgtacagcgccccggcgaccggcgccgcttctcgtcgtccgcgctaagcgcgccggcagccagccccctgctgccgccgcctcgcgtcagcccgcgaatcccagcgcggtcccgaagcgggacgtggaagaagaggaggaggaggtcgaggaggagatgccctggatccaggacaaggcgctggacctcgtggagttcactggcaccgtcacacaggccatcccagggccccgtgtcggctctagccctgttccatggcttctcgcggttcccctcgcctacgtcggggtctcctttgtgctcgcggtcgtccgcaccgtgcgcaggttcacctcgccgcacactaagaagaagcgaagggtgagtaagaatatattcttgttgaagtcactagatgatctgtttcagaagggcagggaggcaataaattatcctgctcttcaggacctaatgcaaaagacaggatttgacatggatgatgtagtaaggaagtacatccgttacacactgaatgaaaaacagttcagtcctgatgtggttgtggatctcatacatcttaggaaggcatcaatgctggaagatgcagaagttgctgaaattttaaatgagatttcaagacgaattgtccgggaaaaagggccagtagttatggacttatctggttttacagagcaaggttttaagcggaagcttgctgtacaagcactgtttggaaaaatcctatacttatcagaacttccggagttctgttcacgggacagctcacttgtagtcaaagaaatctttggagttacagatgaggatgcagacagcctgcggattcacaccctatcagcaacaggtgatatcgaatctatacagaagatggtggacgatctagacctagaacaaggtcccccatcatcgtcttgagttatggtggtggaataatgctaaacatcgtcgttgatagtgttgcaattttagattgatgtgagtttctcgaatcttttcgtttagttttttcagctgctgaagtaggacttgggcctgtgaacacaggatactttcggctggagcctggaggttttgtaaattgcctctcgattaggataacgtatgtcagacctgcccatgatttgagtaaacgagaatactattattatagaaaaaaaaaaaaaaaaaaaaaaaaaaaaaaaaaaaaaaaaaaaaaaangaaaaaaaaaaaaaaa

SEQ ID NO: 5406 - DNA, 1808 bp, Zea mays
catcgagctgtcccctccctgtgctctactgctcttgcgccttgctagcttgcttgcttccctgctccctccctcctcctcctcgtcgcctcttctctggttcttcctggtgtttgccggagcgaggctaggcgcaaggggagggagctgcgctcagccagagctcatcggcgctacgcaagcgcgctgccctggtgtgctgcattgccgaactatcaggggaaaacactgaaataatggaaatcagcttattgcataatgaatctgatgcaggaagcaccagtttgctaccgctgccattgttgtcatatggtccaagatcaatggttccaatacaagtaccaccatcatcagactttgagagtatcctgtcaccagagccaatctacagtgatcttcagttgaaagagatgaactacaatgcagcagcaatggatgaaagcactgagttccttcacttgattcttagtggcaatgatgaaggatacaatagcacaactgaattacaagtttgggatgttgtggacttctatgtctcagaaaacttttctgctctccaatttgatagtttgatgggttttacaaatgaagttagtacttcctacaatgattgtatgaatttagttgatatggtagagcggcccgtggctcgtctgtctctagatgatacaccaaaacccagtaacagtgatgatgcggttccggcagacaatgtcacaatggaccctgatgaaacatccttataccttcagacaaaaccaacagattcagaaacagaaagtagttctgccgcaggagatgttgaaactgaatatctagatctaaagctactttctagatgtatgcctgatttaatggatgttgactcgcccaattgcttatcgaaaacaccagtgaaaaaaaagcatgtgactcttgtgcttgatttggacgagactctggtacattcaacattggatcactgcgacaatgctgattttaccctagaagttttctttaatatgaaaaatcacacagtgtatgtgagaaaaaggccttacctgaaaatgtttcttgagaaggttgctcagatgtttgaggttgtcattttcacagctagtcagagagtctatgctgagcaacttatagataaacttgaccctgatggaaaatatatctcacggcgtatttatcgtgaatcttgtgtattctctgacggttgctatacaaaggacctgacaattctggggatcgacttggcaaaagttgcaatagttgacaatactccacaggttttccagttgcaagtggataacggcataccgattaagagctggtttgatgacccctcagatcaggaactgatcgagttgctcccgttcttggagagcctcgtggattcagaggacgtgaggccaataatttcaaagacctttcatgacaaacttgagcagaattagtttgaggcgacagatgtatcatccagtgaacctgtcgctgaagttagcttcgctccacatggtgcaggccatcattcttgggaagttagatataggatgaaaaatcacaatttctgttatgttagctgttacaaatagcaagcataaactgcggtcgttgtctcgtcgatgaaaatggcttgtatatgtatgtccctttgggcttccgtgtcacggatcattgtacagagacgaacattagtgctgaataaagtgatctgagtgcaattttgctcaaaaaaaaaaaaaaaaatttactaataaggctttgagtttagatgagcccaacatcggaccatagttgtgcgcgcatggtgcacgccattcttt

SEQ ID NO: 5407 - DNA, 1314 bp, Zea mays
gaggccgccccgggctagggtcgcgaacgcgggggccgcggcacacgcaaaattccccatcccccaaggaagtcaggccctcgcgcaccagcgcgaccggaccacaccgaccgcccgtctgaccgacgcaacccagccgtccagacgcgccgccgaccgtccttccaccaccacgcccgcgccgtcgcacgctccctagggttccgcagggccggggatcgccggagatggactggagcgcggtgacggcggaggacttggtggacgcgctgcgggaggtggactggtccatgccgccgcggcctgtcccggagttcttctcccgcttcaccgtcccacgctcctactccaagtggaccagccgcctcaagtgcaacctctactactacaggacaaactatttcatcttgatcatgttcatccttgggatgggcttcctttggaagccagttgctatagttgctgcttttatgactggacttagcatcgcatttctcaatgatagttttgcagtcactttcaatgagaaagtcacaaggaccgtaagacaattttcaccacatttagctgcaaagttgaggccacctataactcctgttcttcgcggtcgaccaagctctaagagatcaattcatatttgtgggcgacctcgctgggtgtttgtcctgttcttttctgcagtgagctgtatactctggttgacctcatgcagtcttctcacagtcctctgggcacttctcattgctctatttgcaactgtgctccatgcaagcttcagaacaccaaatctcaaagcacgtctgaatacattcagagaggaattccgggctgtttggcggaattatagtgagctttaagggtttcctttgtttctctcatgttcatgggtaatgaaggtgtctggtgccgttgtttgtgagctgtgctaggagatctagttgaaggtgaaacgccattgcacattacatggactacttgctctcttgggaggtgggattctggttgggttgactccgaatgcgatgctatgccagcacacgatccttcaagaacagtagttttctttcgtacttctccctaaccgagcattagagagaggacagcatgtaaaggatgtaaaaatgtacttgttctcgatcaaaaagtatgttgtttgttgaaattattactaatttgtattgcatcctcttttggatcatttgttaggtgactatcattttgcttcagcatttttgtcgagttagttacatcaagtgatactttaaaaaaaactctgttcctcgtgcaaaactcgaggaggggccccgggtaccc

SEQ ID NO: 5408 - DNA, 1281 bp, Zea mays
gcacgagaccattacctagaacatcctaatcgaaaaaaaggaaaaccacacaccggccaaaccacgactgcaggaggcgggtagtagcaagagaaaggaaacgctctcccagccccaaagaaaaaggcagcacaccaactcaccaagaaagtgtggagctgctcctgcctgcagcctcctgctcatcgaccctttcgccccacaagctcgattcctcgctcggccatggctgcacccgcggaggagacgcttgccgccgaggatacggcgtcgccaccgccgccggcgaggtctgcggggttctggttccttggcgaggataagtctgtccacaaggctctcggcgggggtaaaactgctgatgtacttttgtggaaagacaagaagacctctgctgcggtagttggtggtgcaactgtcctatgggttctgttcgaaattgtagaataccatctcctgaccctggtttctcatgtgctgatcgctgcactgaccatcttgttcctgtggtccaatgcgactgtctttatcaaaaagagtcctcctgatgttcctgaagtgcagatatctgaagaccttgctgtaaacattgcgctagcattgcgtgctgacatcaacaaggcacttgccctgcttcgggagattgctctgggccataacctgatgaagttcctaggcgtggtcgtcgccctttggattctttcagagatcggggagctatgtgatctcctgagattgatgtacattgtggtcttgatcctccacacagtgccgatactgtaccacaagtatcaggaccaggtggacaatttcgctgcaaaggcgcacagggagctctgcaagcaatacgcggtcctggatgccaaagttctgagcaagattccaagagctccaccaaaagataagaaacagaactagaacgtggaggatgacaagcgccttgttttcggcttgggcgacgagagtttgtagccaatggtctgatgtggttcgtgggctttgtgtaggtgcacagtttaacgtatatgttctggtcgtgtaatctatatgtttatataaacctgtaggggtgttgatgaccatcgaaagtgtcgtaaatattcagtagtatatgtagcttagggcttaacggttgtgtttataaggtcattgtcgttgtcgatgggaagtattatcatgttattttcaggactcaggagtataaaatgaaataaaatgtgaattcatctgaagctgaaacccaaaaaagcggcaaaaaaaaaaaaaaaaaaaaaaaaaaaa

SEQ ID NO: 5409 - DNA, 1414 bp, Zea mays
  misc_feature (1271)..(1271): n is a, c, g, or t
tttgacatttgattttgcagtgggaaagaaagataccctacactctacttacactgtataatgcacaattaccattacccatgaaggaatgcagcagaattatcagactagttttgcattgttgcactgcatatttccaccggccgtgtggactgtggagcactacgcatcagtcttcagtcataggattattttatacaagtgttgtctaactttttttttctgctcgtttgatttgatgcagggctgggtcataatccgtgacgctgcccctcttattgaagcggcaagatctgttgttactcaactcagatgggacgcccgcgttttggatcttgacatagccagtgatgaaaaactactggtctgtcagaagccgtttctcagaaaataatgagcatagtagacactgacacaagatatgaacttattctttcaccctacacactgttacaattgctgtctgagcacaactgagtacaaagtttgggtaaaaaacacgggaagcatgattcagcaaacttgtcatgcatcaccatggaaccgcaaggtgccattaaattgatcggtcaagtgcatgctgcagaaacaggcttggtggctaagctttccaggccaaggttttattgccaggatatagagatgaagccataaaaattactttagtagtgaaaccatatccaataaagagatgctgctgcggtgtacataatcgccgccaatgtgccatataggtataattcattttttcccttgttacaatttctctccttttttctgtaactgtgccaatttgttttattttgtatcttgtatgtaaattggttggtctatatactgatcatcccagactacagcctagtgaaatcaatataattattatttggagatgaatgataagcaagagcaaattataatcattccactatatttatctatcatttctacaattcattatttttgtacattgtacggaacaagagtgataccttcattattcaagaagagtaaaatacatttccagtagaatacatggttaatataagaggaatgtgtcaatgtttctttgtggtagttattgcaatcttgcaggcaagtttttgcttttgatggccatttagcgttagtcggagccacttgagatgagctggcattgctctttggtttcaacatcctatgcttttgcggaggattgagcgtccagttcatcttagctgtagttgctatctgccataaccaagtgggctgtcgcattttgatgttgacgtgcnaccttagtccgaaggaattggctttgtcattcttccgtggttctggagtaaagaccatcctcccagtattatattaaaaagatactaaaatatagttccgaccgataaaatctcaactttgcccccacatcactagcgagtcg

SEQ ID NO: 5410 - DNA, 1652 bp, Zea mays
ccacgcgtccgaaaaaaaaatagagtagactcgccagccaggcagccaccctcaccctggtctggtctcctcgccgccaacgccgcctactccgcgctcctccaaaccaaactgaaccctatcctagcacgagtgcacgacggtggcagcaggagatggtggggacggcggaaggcggcgcggagagggcggtgcggcggtgggtggacgccgccggcgggcgcctggtcctggacggcgggctggccacggagctcgaggccaacggcgccgacctcaacgacccgctctggagcgccaagtgcctcctctcctccccgcacctcatccgcaaggtccatatggactacctagaagccggggcgaacattataatcacagcatcgtatcaggctactatccaagggtttgaatcaaagggcttttcaaaagaacaaagtgaaaacttgttaacaaagagtgttcagattgcactggaagcccgtgagatgttcttgaaggaacatttggagaaatccactcctatacagcatcctattctggttgcagcagctctagggagttatggggcttatcttgctgatggctctgagtacagtggggattatggtgaagctggtacgaaagagttcctgaaggactttcatcggcggaggcttcaggttcttgctgaagcaggcccggatttgattgcttttgaaacgatccccaacaaattggaagctcaggcatatgttgaactccttgaggaatgtaacattaatatcccttcatggctttccttcaactcaaaagatggagtgcatgttgtgagtggtgattcgttaattgaatgcgctactattgctgacaagtgtgcaaaggttggtgcagtcgggataaattgcacacctccaagatttattcatggactgatactctccattcgaaaggtcacagacaagcctattctgatatatcccaacagtggtgaaagatatgatggtgaaaaaaaggagtgggtggaatccactggtgtgtcagatggtgattttgtttcgtacgtaaatgaatggtgcaaagatggggctgcgcttatcgggggctgctgcaggacaactccaaacactatcagggccatacacagaactcttaaccaaggctgccacaagcatcagttacctgtaggctgtagcatagatctgtgctccactcctgatgctctcctcccagcagtaccttgagctgtatccccgagattccttaaccagcgcgaaccaatatactgttgcgtgttctcctgcaaatgagatgttctgcacctatgtttgtaatgttgtatttctgggtttttaagctatccaacttggagatacaaccggtgaggaagcagcaacaataggtagttctacttctgagtgaggaaaaacaacttgcggctgagttaatgaagcttagtagctaccaccgttgtatgacagttgctcagagatgttatcttcattaagtgcttatattaccgctagttccctgtgaaatttgttaaaccattatatgtaagttttgtttgacaagactgcatctcctgaaactaagatcttagtttcctgctaatacccaaaaaaaaaaaaaaaagaaaacccggggccgcggcccgaaacccaaaaaaaaaa

SEQ ID NO: 5411 - DNA, 2342 bp, Zea mays
cattgggtacctcgaggccggccggggccgcttttcgggattccattccatttcgttttagcttcatcactcaagggcgaggggccagcgcgcgtgggagcgggctggatttgcgcgtcctgtaccgagcgccccatgtgacaggtcgctcgcttgcccccgctccgccgctccctccctcgtcccgcaaagcaaccgcaacgcgccgagcgggcagcggggtccccggccagccgagcaatcccccctccccaccaccccaggtgccctcccagcctccgcccggaaaaggctagtgcgcgcctcgtgctcgtgctcccccgagcagactagaccagcgcgctagcgccagcaaggccaaggcgagggaggggcgatgctcgcccgatctgctacagccgccgccgccgccgggatctggctgtgattaaggatgtcggcgtcgcggagcgggaggatcaggcgggccgggagcgtggcgctcggggactttctgcggcgggaggcgtcggcggagcgggccgcgttgggaggcggcgagcggccctcggtcgcggcggggcaggcctgccgggcgaagaagggcgaggacttcgcgctgctcaagcccgcctgcgagcgacgccccggcgcgccgtccacctccttctccgccttcgccctgttcgacgggcataacgggagcgccgcagcggtgtacgccgaggagcacctcctcgccaacgtgctcggctgcgtcccggccgatctgagcagggacgactggctcgccgcgctcccaagggcgctcgtcgccgggttcgtcaagaccgacaaggattttcaaactaaagctcattcctcggggacaaccgtgacacttgccataattgatggctccgttgtaactgttgcgtccgttggtgactcacgttgtgtccttgatgctgcgggatccatctactatttgtcggctgaccaccgctttgacgctaatgaagaggaggttggacgtgtaaccgaatgcggaggtgaagttggaaggctaaatgttgtcggtggtgctgagattggtccccttagatgttggccaggtggtctatgcctctcaagatcgattggtgatcaggacgtaggtgaatttatcattccggttccttatgtgaagcaaattaagctgtctaacgctggaggccgtcttattatttcaagtgacggtgtttgggatgctttgactgcggaaatggcttttagatgtgcacgggggcttcctcctgaggctgcagccgagcaaattgttaaagaagcagttgaatcaaaaggattgagagatgatacaacttgcattgtcattgacataatcccaccagagaaacaaaaatgcactatagaatctccaaaaacgccaggaaaaggccttgtacttctaaaaaatttcttcttaaggaaaacggcatctggttcattgtctctcgctgacaaggataattatcccgagccagatttcgtggaggaggtctttgaggatggatgcccatccctttcgaggaggcttaattctgaatatcctgtccgagatatgttcaagctttttgcatgtgcaatttgtcaaattgacttggagtctggccaaggcatatccatacacgagggttcgtcaaagacagggaagctgcgtccctgggatggccctttcctttgccacagttgccaggaaaagaaagaggcgatggaggggaagcgtcactcgcgagactcctcgtcaagaaatagcgggtcaagtgaatagtgactaaagccaggagtcatcttgaggcgaccacctagcggtgtgacgagctaactcttgttgcagttgtcattgtagcagcacttcctctatacatggattaccattggacatagacagatgttggaacttggatggtgccatgcgtacatatgttggacctaatgcggtaatggaccgtcggccaaattcaatcgcctctaggtaccacaccggcgacggcgtcttcggcaaggcttgtagcagtagctcatgcaggtagtgatgacaagggactgttagcgaagaatgtcgacagtggccaatggtcatgtaaattgttcatcgtatagaggtgcaagtgacaaatagccacggttttgtaattctgagctaggattagctattgagaccctgtaattcgtctgggcagacctcaaactagaggtcaacaacgtagcctggcctattgtagaatgtatcttgctctacagtcttcatgattcaacgctgtaattaggctgttgccagtgcttctctgtcatgttagctatcgactccactcttatcaaaaaaaaaaaaaaaaaaagcggcc

SEQ ID NO: 5412 - DNA, 1447 bp, Zea mays
ccgggactcagtggcacgggcgcggacactgccgctcgcgatatttgcgagagagagagagagagggcccgagagccgaggacgagtgaagtctggctggcgtgatgctgcttcggagcgcgtcctcgccgctgctcaactgcgggcgcgcgccggctgcggcggcgtcggtcgagcacctcgcggtggtttcgccgttgttgtcaccggcagtggcggcgcctaggcatgggccggtgctgtgccgcgccatgtccgagggggacctcgccgcgccgctcgtgcccaagaaggacgatggacacgggagggcgccgaggctgtccctgtccgcgtccttgtcctcgtccgcctccatcttcgtcgaggaggaggacggcgagggcgaggaggaggaggacctggtcgcggtcgcgggggccggcgtggacgtgccgctgccgctgcgtcggctgctgacgaacacggggctggacgtgtccgccgccgcggcgctggcgttcgtggagcagggcgtcgggggcagcggcgggggcgggaaggcgtgcggcagcagcggcggcaagggtgggatcggggacggcgacggtggcagcaaccgcgccgccacggacgcccactaccggcagatgatcgaggcggacccgggcaactcgctgctcctggtcaactacgccaggttcctcaaggaggtggccggggacgcggcaagggcgcaggagtactgcgagcgcgccatcctcgccagccccggcgacgccgaggcgctgtcgctctacgcgggcctcgtttgggagaccagccgcgacgctggccgcgccgaggactactacagccgcgccgtccaggccgcgcccgacgactgctacgtcctgggctcttacgccgggttcctgtgggacgccgaggaggacgaggaagagaactccgagcccttgccaccgccttcgctgttccagggggcagctcagcgtccttccatcacagcggcctcttagatgatcgtgaactcgatctagatctcaccaccgcctgtgaacgaagctgaatctggaaccctggagagtggagagtgactgggtgataaccgtgcagaaacccccgacgagtgactcacatcgccggcaggctcctcgccgcttgtgaactgaatcacggcacatgtaaaactgaatctggcagagcacacacgcgcctaagcctattagcgtctatagactttgcagggctatgtatagtagatatgtagattgagaccctgctgagcttgtacgtgcagtatgttcctagtcacttgtgtatcattactagtaatgcagtatccctcgcgaaataaacgtcaaaaccccttcctgctgcttcataaaaaaaaaaaaaagaagagcagatatcgaactgcaagaactgatgcactgaatcacaaagctttacaaaaaaaaaaaaaaaa

SEQ ID NO: 5413 - DNA, 2678 bp, Zea mays
atgggtacctcgagccggccgggaaaccccatccaaccggtctcgagtctcgacagatcggcgtcgatgaccctaccactcgctggccctcccacgccttccccggcatggccgagcccaccccaccgtccctcccctcgtccgactgcgcagacgtgctcgtgggatcctccgccccctccttcccctacatccgcggctggtcattcccctccgactcgggcgctgccatgggttctgtagaggaacatctccagcccaaggtgtgcgtgcagacgagcacctccgcggggcttgagcagatcctgccctggctcttctatcacaaggtcgtcggcgtcgcgcagttcctgctcttcgtggagggcaaggcggcgaaacccaatgtcgcgggagtcctcgagtcaattcctggggtaaaagtggtgtacagaactaaggatcttgaggagcggcaggcacggaggtcagcttcgttttctcagtcccctgtttccgataacagtttttcttgtgtgtcatttgatcatttccacataaacaccatataaaaaaataactgcatcttgtttcaactttcaaagtgagaaccaaaagcatagggttgctggtgtagccagacaaaactaagtcagaccgcatccaaccattgacaattatggataaagggagaaattttctatgcctagttgcctactattaacccacttctaggacatgtcgaagattgtttaatagggaatatacgtggaatttagacaggtttgagccctcgatgtgagataataccctacatcatgtttgaggtggttctgttgttgtattgtatgttctaatctgatgattctatgatctgatgctctcaggcggttccctgtccctcttttaatattctaaggagtgacggaagttacatgataggcaccgagtcggctatcaagttcatgatggaaccgagtcggtacaaagtcatacgtgaattgaattctatgtcttcgagtttatctcttattctgttgagatcttactatatctgcgcttctagaatcctcctggttgtaggctcccctggtcctattgccgagtccttcggcttgtggccgagcccatgagctcttttgctcaggctcttctttacgaagcttggatagatgtcctagtatatattattgataggacatagcatgtcataatgtctggcttggcatgttctttgatagagtttttatcactcatctctgtcaccttcctgatgtattttattgcctcgcctccggtcgaatctggaatgagacttggctttcaggatttttctacaaaccttgcaactatgaactctttgtgaagcaatccctcaacatggagatggctattgtaatggctcgggatggtggcatggattggatcatacatttagacactgatgagttactttatcctggcggagctgctgagtattctgttagacgtttgttagctgaggtccctcgtgatgtcgacatggttatttttccaaactatgaaagcagtgttgagcatgataatataaaagatccattcagcgaagtatctatgttcaagaggaattatgatcatcttcctaaagatacttactttggcatgtataaggaagcgacacgaggaaatccaaattattttctcacctatggtaatggaaaatctgctgcacgaattcaagaccatctccgtcctaatggcgcgcacaggtggcataattatgcaaagagcccaaatgagatcaagttggaggaggctgcagttctgcattatacatacactaaattttcagatttgacatctagacgtgatcgctgtggatgcaagcctacaaaagaagatgttaagagatgtttcatgttagattttgacagagcagcttttataattgcatcaactgctagtgaagaagaaatgcttcgctggtacaatgaacgagtcgtgtggaccgataagcagctgaacttaaagcttctgaggaaaggagtgctgactcgcatatacaccccaatgacaattgttcagagtctgcgcgaatccggtgtcttcacttccgccattacagctggccaacctgctgtgaatgccaaactctcacccaaggaaaccaatgcgcagagccaaaatgttaccgcacctgggaacatgacaagagtggtcagatctactgattcaaaggcatcaggcagaaagatactgcaagccgttgatcttgccttcagcgatactaatgtaactgctgttccaccgttgtcgccgcccagtttggacgaacacaggcatcatagtgaataataatgtcatacgtatgatatatatattttttgctcggcgtataagctcctaagaaaaggaagaaaagaaagttactgacatcttcgttaagagaagtgctaacatcagcttggatggtcaatttttatgcaatctgcggcagcgaaattctggcaggcgtcttttttcgcgatcgaagtgagatgcgggtgcgggcaacattgatagatagtgttttactggaaacaaaacatatttttagcaattttgtacaaaatctttatgaagttattaaccatatatggactttacttttcgaggggaactgttccacggcaagaatctgttaatgggtggagtagggtggtctttttaatgggcttgcc

SEQ ID NO: 5414 - DNA, 1946 bp, Zea mays
ccggccggggcggcaccgcctcccccgccggcagtaattgacttgacctcacttcccctgtggggaggctttaattttcttccgatcgatcatagtatccgctgcggtgtgattgcctgcccccaccccattgcgcctgcgcctgcgcctcgcttcatccggtgcgctgcccgcctcactcccgtcgtcctcttcctcgtcctcgctctcgtcgcggagcggtgtggaggcgcgcgctccttgaaggcacggggcaagagcggaggaagatcatctgggtgttggagtcatccagaggcacaagctgaggaatggggcaaaaggactccaagccttcacatggatatggctactcttcttatgattacgggagtgcttcatcgggatacacctcgagaaacactgggaattcgtcctccagttatagcgtcaggtacgcgccttcttcggagaacagtgtacagccggagacacatgccaggttgcagaggaagtattccaagatcggtgatgactaccgttctttgagccaggtgactgaagctttggcacaggcaggccttgaatcttcaaatcttattgtaggcattgattttacaaagagcaatgaatggacaggtaaaatttccttcaatcgccgctgcctgcatgatattggaaacactccaaacccatatgagcaagctatatctattattggaaggacactttcagcatttgatgaagataatttgattccctgcttcggatttggtgacgcatcaactcatgatcaggaggtattcagcttttacccagagaaccgcccatgcaatggatttgaagaggcgctagacagatacagagaaatcgttccaactcttcgattagcaggacctacatcctttgcgccgatgattgagacagcaattggaattgttgacagcactggtggtcaatatcatgttcttctgataatcgccgatggacaggttacccgaagtgtcgatacacaatctggacagttgagtccacaggagcgggatactattgatgcaatagtaagagcaagccagttccccctgtcaattgttcttgtcggggttggtgatggaccatgggacatgatgcaccagtttgatgacaatatacctgctcggtcatttgacaatttccagtttgtgaatttcacggagattatgtcgaagagcatagcagctgacagaaaggaggcagaatttgcattgtcagcgctgatggaaatccctacacagtacaaagcaacaattgatctccaactcttaggccgtcgccaaagaataaccccaagaattgctctgccaccaccaacaaggaccgcgtattcgcggtccagtagctttagccaacagtctggtgtttattcgcgatcaagtagctttgaccaacaaacaagtggcgcctctcagcaacgttctgagagcttgaaacagcagaagaaacctgcagccccgaagagacctgacacttatgcttcagaaagagctttagaggacagaattctgtgccccatctgcatgtataaatccaaggaccttgcatttggatgtggacatcagacttgctacgaatgcgggagaaatttggagcgctgccctctgtgccagcagaacataaccacgaggatcaggctctactgatttgatcaggctatgaattagaaaaatgttggaacaacagactcccgggcaagatgttcagaaccagctttgtttgtaccgtgcttcattttgtaattggtgtcacttttctcggtagttatgccaaaggaaagcgcaccagaaaaaataatgtacatatttatcttccagtagtactgtacattgcgagctgcacatagatcaaggtgtttttttgtgtggggggggggggccggtgttcaaataggggccgggtgaagggaagaaatcaaggtgtcatatatatat

SEQ ID NO: 5415 - DNA, 3174 bp, Zea mays
aaaataataataataataataataataataaccatcctttttttttttttaataataataataataataataataataataataataataataataatatactggttcttttgctagcattacttaatttgtttctcaaaaaaaatgtagtaaacacattaattactacatacaatggactcaaggtacgagtaggttctcatctcatctgagacccggctgcatgagcagctcgtcgaaagatgctcctccattctgctccacgctacctgaacccatcctgttgctgcaattggacacgagcacccgctccatggcaatggcgtcctggatctccttgagcacttccgagatgggaggcctctgggcgcccttgggcttcacacacattatggccacctccgcgatcttccacaccgactgcaggtcatagcagcctctgtccaacgactcatcaatgatggcgtggatgttcccgctctcgatgtgcgatcgggcccacgcaacaatgttccggcagttgagcccaaagttgtcattcgagatgggttcatgcccagagatgagctccagcaaaatcacgccgaagctgtagatgtcgctcttctccgtcagctgctgcgagatgtagtactctgggtccaggtatccaactgtccctcgaactatacttgacacatgagacccatccactgcaggtttcgaaagcccaaagtctgccacttttgctctcatgttcttgtctaggagaatgttactgctcttcaggtctctatggatgattgttggggagcatcccgtgtggagatactctatacctttcgcagaatcttctgcaatctcaagacgcttcagccagctagttatcttttcattatcagctccacgaaggtgctcttttagtgtcccattatgcatgaactcatacactagtatgtttttgccatcttgctgactgtaaccaaggaatgtaaccaggtgtctatgatgtattctggaaagcaatgtcacctcattcaagaattctctgattccctgatacgagtcattcgtgagaagtttgactgcaatctctctcccatcagccaactttccatagtatactatgccaaagcctccagacccaattcttctctcaaatttgtcagtagcattttcaatttcagataaagaaaatctgtgtgctgattctgtagccacttcactaaaatatgaaccaagttttttagctggtgctgctgcaatgacaacagtgtcttcatgagatttattctttctcctacatgtaatgaaatagcacccaatagcaacacccagtaagacaacggctccaatcaccacacatataataattatggtgtggctaatgccattgcttactatgtgaaggccactgttgcctgagaagttcaaaataatgcttctcttgaaaagtgcttttggaacctgcccagacagcttgttattttgaacatacaactctttcaggttaggtaggtcacccaaagaagatggcaattcaccagttaactgattgttctcaaggtgaatatactgcaaattcccacattctctgaaatcaggaatttggccagaaaatgaattaccatcaagccttagctcaaccagccctgatagctttgtcagttccaccgggatacttccggtaatgttcttcccagacaatgtgattgagaatatccttggagaagtttctgaactgcattgcacccaggaccatgatgctggtaagcacggatcaccaccctcttgtgcccaactttcctgtggatatcgtgataccatgctggccatgatatttgcatcctgtgatcccatagtaatttggacatatttgtaaatctccagggcattcaaaataggcccctttgaagaatcattcgtcttcctgaacccaaaggagaaaacaaacggaagtgacaaattcgtgtagcctggttcatacaaacggtatttcccttgagcattctcctccacatcaacagttggtttactgagtgctggcatgccagggacctctaacttaaatttcctcgtttcatttggtgccaaatcttcaatttctgcaaaatacgagactccccaagcatttgctgggaaaccttccaaatcaaggcggtagttcaatgacccatcctggccaactactgctgtttgcatgaccttttcaggtggttcttcgttggtaccgacaaatatgggttttgtagttgatattctttcagtccctggagcaacatcaacaaggtaatttgctctcctcacagaatcagattcccagattctatcaaatggatcatcaggatatctcactgaatcattgcttcctgcgccaaaatttatcctcgcagacagtccaagaaagaagcgtgtctcgtcagtggtgtagtagagcgaaccgttaaactgtcgaagctccagagtagagatgaagggctgtcccgtgctggcattggagagacatacactgagcgtgggagcagcagccaagatgatggcttcctcaacgacgggggtggtggcgtcgtcgacgacgatggtggaccagggagacgctccgagggagatatcgaacttcgggtagacgttgctgttatcgaagttgccgtagaggaaagtggccctgacaaggtagcgcgtcctgttcctgacgttcatggtgtagcagtgcttcctgttgtccgcggggaagtagcgcacggtggtcagctgctgctgggtctgctgcaggccattctggaccagcagctgcgcggcctggccgccagagacgaagctggcatcagaggtccactggatcccaatggcatccgtgtgatcacgagctcccccgcagtccaagctaatgaaaccaggctgcgcagcggaaggcgagaagaggagcagcagcaggtggaagaggatagcggcggagaaggcggcagccatggaagtcggcttgcaagttcctcctctctcgcagcctccgccaccgcaaagcacagtgcgccacttctgctgctgttgctgttacaagcaggcaggcaggcaggatcgatctggtagtagtcctagtactagatcagtgtgttggtggacatggttggagaaaacctgaagcaaggcgatggacatccagctttttcggccgctccgtctgcacgcggcgctcgt

SEQ ID NO: 5416 - DNA, 2052 bp, Zea mays
  misc_feature (2052)..(2052): n is a, c, g, or t
ctcgaggccggcccgggtaccgcacccacaccacaccacaccaggctcctcgacagtcgatagcctcccaagtcccaactcgacctgagccgattcggaaggacggtttgcctacctctggttccggcggccatggcggtggcggcccctggccagctcaacctcgacgaggccccgtcatggggctcccgcagcgtagactgcttcgagaagctcgagcagatcggcgagggcacctacgggcaagtgtacatggcgaaggagacgggcaccaacgagatcgtcgcgctcaagaagatccgcatggacaacgagcgcgaagggttcccgatcaccgccatacgcgagatcaagatcctgaagaagcttcaccaccagaacgttatcaagctcaaggagatcgtcacctccccaggcccagagcgggacgagcaagggaagccaattgacggtaacaagtacaaggggagcatttacatggttttcgagtatatggaccatgatctcaccgggcttgctgatcggccaggaatgcggttcactgtgccgcagattaagtgttacatgaggcagctgcttacaggcctgcactattgtcatgtcaaccaagttctgcatcgagatatcaaaggatctaaccttttgatagacaatgagggtaacttgaagcttgctgattttggccttgcaagatcattctcgagtgatcacaatggcaaccttactaaccgtgtgatcactttgtggtatagacctccagagttgctacttggaagcacaaagtatggcccagccgttgacatgtggtcagtgggctgtatttttgcagaacttctcaatgggaagccaatattgcctggaaagaatgagccagagcagctgactaagatcttcgagctttgtggtacccctgatgacacaatctggcctggtgtcacaaaaatgccttggtacaacaacttcaagcctccccggccattaaagagacgagttaaagatttctttaagcattttgatcgacatgcactggatctgttagagaagatgttgactttagatccatcacagaggatatcagcaaaagatgcacttgatgcggaatatttctggactgatcccttaccatgcgatccaaaaagcttgcccaagtatgaggcatcgcatgaattccagactaagaaaaagcgtcagcaacagaggcaagcagaggaagctgcaaagcgtcaaaaacttaaccatcctccaccacattctcgtttgcctccactccagcagcctggccaagcacatcctcaaatgaggcctggccagggtatgcacaatgtgcctcctgtggcagccggcccaggccatcactatgcaaaaccccgaggaccaggaggccctaaccggtatcctcagggtgggaatcaagggggaggctacaatccgaaccgtggagggcagggtggtggctatggcagtggcccttatccccagcaagggcgagggcctccttaccctggagcagctggcccacggggcagcggtggcagtggctatggggctggagggccaaactaccaacagggtggcccatatggtacgtccggtccaggccgaggaccaaactactctcaaggtagtggttcccgcaaccaacagcagtatgggaactggcaataatgtggcagtattatgccattgatatgtatgtatttgcagaatgcatttgcagcacctttgcactttaagcatgttgtgagatgtatgtcatgatagtactctaattcagtccagatgtctcagaagagctgtttatgactccagatgtagattatgattatcgagaaacgttttgtacttagaacccttgattcacttattagaagtatgccacaaagacctagcagagtttgctattagccccagtttcatacttcatatccaaattggaatcaggaacgcatagaagaagcctgaagttcagaaatgaaatttgttatggttgtgtacagttttgttatcacttcgcttcaatcacattatgaagcttaaaaaaaaaaaaaaaan

SEQ ID NO: 5417 - DNA, 2220 bp, Zea mays
  misc_feature (19)..(30): n is a, c, g, or t
  misc_feature (2213)..(2214): n is a, c, g, or t
ggccggccgggaaaaaaannnnnnnnnnnnaagaccgagagagaaaggaaaaaaaaaaacgcggcgcagaagccagaagaaccagcgagccaactcccaacctctcgcccgatctcgatctcgatctcacgggcgccgccgccgccagcgacgatggatccagagatgctgcggctggcgcaggagcagatgcgccgcatgtccccggacgacatcgcccggatgcagcagcagctgatgtctaaccctaacctaatgaggatggcgtctgagagtatgaagaacatgaagcctgaggacttaaggcgagctgcagagcaactgaatcaaacaagaccggaggatatgcgtgatatgaccgagaaaatcgccaacactactccggaggagtttgctgctatgaaggcgcaagcagatgctcaaatgtcctatgcgatgtctggtgctaagatgttaaagaagcagggaaacggacttcataaccagggaaagtattcagatgctgctagtaaatataagcttgctaaggataacttaaaaagcataccatcgtctacggcgcatactctgcagttgcaatgtacacttaatttaatggcttgttacttgaagacaggccagtttgatgaatgcataagtgaaggtacagaggttctaagttatgattcaaacaatgtcaaagcatattatcggaggggtcaggcatataaaggactcgggaagttggaggcggctgttgctgatttgagtaaagcccatgaaatttgcccagaggacgaaactattgctgaggttctaagagatgctgaagaaaaacttgcacgggaagggggaggagtgagcacgcggaaaggtgttgttattgaagaagttgttggagatggcgcttcacagccatcaagcgagtgaaagaaattcttctgggtatactgtttcacaacctacctgaaggagcaggaaatattgggctgtcagggtctttagaaaggccaagggatgatcctacttctatcaggtcatcccaaaattatgtgtccaagagcgatcctgagggcgggtcaaacttcggaattgaaggaatgtcgcctgaacttgtcaaaactgccactgatatgattggctcaatgaaaccagaggagcttcagaaaatgttcgaagttgcttcttcattgaatagcactagctccgctggtccaaatctgggacccaatatgccagaaatgtctcctgatatgcttaagatggcatctgacatgattgctagtatgcctcctgatgacgtacagaaaatgatgagttttgcttctcagatgggtgggcctggtggtgcccccaggagttcagagaatattaactttggaccttcagtgagagctacaacgagtaattctgcccgtggatcatcatctcaacctgttttggagaaccctgatgaactatcagatgaccaaaggatgagccagtcatcctctagtcttccaccttctacagctgatatgcaagaaaccatgaggaattctatgaaagaccctgcaatgcggcagatgcttacatccatgatgaagaacatgagccccgagatgatggcaaatatgagcgagcagtttggaatgaaactgtcaaaggaggatgccgcaaaagctcaacaagccatgtcgtcattatctccagaggatttggatagaatgatgagatggatggagcgagcacagaaaggggtagaagtcgcgaagaagacaaagaactggctcttgggccggcaaggcttgatccttgctattgtcatgctgatcctagctttcatccttcatcagtttgggtttatcggcagatgatgggggtgacttgggtggctgcatcagcatggaaatagattattcgatggcgatgcagagttccctcttgctaacaactgcttaaaagcgctttgggggaaggccggattacgagaattctttgtatccgtatcttatgaaagtgtaactctgtccataaagctatttcatcctatttttaccagcaaaggtagtagaaaggaatcgagccgaaactgttgtgataacaagacgacatgtaatatgataatatccttgtggtgctttcagttttaagtagcagttttgtttaataaagcatatgcaaaggtgaagtggaacaaagtacatgcgcacacagaaactaactggaagatagcatcttcaattcttaaaaannaaaaat

SEQ ID NO: 5418 - DNA, 1060 bp, Zea mays
cagtagtatcttgaacgtcgagccctcccggcccgccgccgcagtccacaaatccgcacccaaagcaagcccaacgaaacccagacggcaacgagacagttgtcatctcactccaccgcaccgtccgcgcacggctcgccggccgtcactcacacaaccagcacgacaccatccgttcctggccttcctcccgtgcaactaccactcgcgtcaccgcggaaattaaccccgaaatccagcgccttcggcacgagcacgaccaggcctgcgcaggagatggggcggagaggggagccctactacgtcgaggcggtgccgccggtggacgtgaacaagaacacagagtggttcatgtacccgggcgtctggaccacctacatcctcatgctcttcttcgcctggcttctcgtcctctccgtctctggttgctccccgggggcagcctggaccgtcgtcaacctcgcgcacttcgccatcacttaccacttcttccattggaagaaaggaaccccttttgctgctgatgaccaaggcatctacagcagattgacatggtgggagcaaattgacaatggtcagcagcttactcggaacaggaagtttttaactgtggtacctgtggtgctgtatctgattgcgtcgcacttgaccgactacaagcagccgatgttttttctcaacacgattgcagttttcgtgctggtcgtggcaaaattgccgaacatgcacaaggtccgcatatttggaatcaatgcagacatctgaggacagctgcaagaagtacatggatgcgatgccatgatgttatgaacaagcagtgtgtttctcaaactcgacacaactgcctgtaatatatgtacaggtttagaaagaactgtaaatgaatgatactctaggatacaaggtttgcctgcagactgctctgtgttgccgttgccgctgctttcttttgagtttcactgaaagtggaaaccataacttgggtaaatgtaacgttcggttttcagcttcagcaagacaataatttaccagcaaaaatgtttcaaaaaaaaaaaaaaaa

SEQ ID NO: 5419 - DNA, 1595 bp, Zea mays
gggacccggcctcttctccgacatcggtgggaaggaaggatctactcattaaggactacacctacgaccagaagctgtccatctccaccgccagcgcctctggagtggatacctgaccaggacaagagatagagtctagttcggtcctttaagcgaatcagaatccgttcgtcggagaggccatgggctcggcgcaggatccgttctacatcgtccgggaggagatccaggagtcgattgataaattgcaaagtaccttccaccgctgggagcaaactgcttcaaacacaggagaatatgttcatctgacaaaggagcttctgatcagctgtgaaagtatcgagtggcaggtagatgagctagaaaagacaatctcagttgcatcaagggatccggcatactatggacttgatgaagttgagctttccagacgaagaaactggactggttcttctcataagcaggtcggtacagtcaagagagctattgaaaagggcaagagcaatgcagcaacttcaaaataccaggatacaagcaggaccaaccactattctgcccaagataatgatgactttctttcttcagaatcagatagacagcttctactcatgaggcagcaggatgaagaacttgatgagctcagtgaaagtgtccaaaggattggtggcgtgggactaaccatacacgaagagctgtctggacaggaaaggatcctaaacgacctaagcttggagatggagactacttccaacagacttgatttcgtgcagaaaagagtggccatggtgataaagaaggccggcatcaagggtcagatcatgctgatcgtgttcctgattgttctgttcatcattcttttcgttttggtgttcttgacatagccaagtgcaccagggtcctcggttttctctctcatttgttgtgcctccctagtacgaacactagtaaattggtcgcgctccgcgtgagttgttgcttgatgtgcttacataagatgtagaatcttgttgctataggcatgtatcaacaggtgctagcagcttgcagttctccttctaacagaaacaggtcgaagcagattttttgttctccaagtgatcagtttgtccaaggttgttaggctttccgtaatcgcttcgagtttgcttttcaagatcatcattcacaggttgcttgttagactttggctcaacataaggaggcagcatggattctttatgtttgcaacatttagcttagtgtaaggagccttgtttctagtggtaccaccacccggtatactaagaagactcaatgaacgcccttgattctctgggtgctgagctcttacccctgaatctgcatgtctcccattgtgttcatgaccaccaggccattgagatcaagctctactacctccatcagcttcttttccaaagggcgaacaacttttctgtttagcttctgaacatccttttttgggtcctgttagtgtccacaggagacactggtttatgcaaatgttcattctcaacagacacatcaggttgttgcttcctcgaattcttatcaattgtatggtgtgcgttagcaacagaacgaatatcttttggatc

SEQ ID NO: 5420 - DNA, 2313 bp, Zea mays
gccgtgtctagtgtcttccgtctcgatcccgcgggtgggactcgccggcgacaaaaacgaaaagcgacttgccctccgcggcctccggccttcccactccactcgccctcctctcctagcgtcggtgagccggtgcgctgcagtccccgctccccttccgcgtcgccgcgatggaggtcttccgggagcacggggacgacggagtgccctaggattccatcacgccgccaagcaccagtcccgcagccagggatttcttctccgaccccgaccttcatgtgagtcgcggccttcctcctcgaagcggatccggcggattggaggggcccaaccatagcaggtacttcttgcgggtgtaagcatttcgctgcacttggagacgcttatttggagtatttgaaggctttggagactgcccagatgaagagtagatttcttgttctctgtgccattgtctgcgtcatggctcagatgggagatgccaatgtcgtgctattggggaataatctgaccttgtcctttgctgatattgaggcaagcttttctccaggagtgaaaggatcaggagtcaatggcatagtttatgcttctgaacctttgaatgcctgcagcccgttaacaatcaaggcagtcaagggcccgccatctccctttgcattaattgtaagaggcggatgcacgtttgatgagaaagtgaaaaatgcacaggatgctggattcaaagctgcaattgtgtatgacaatggaaataggggggtcctggtttcaataattgttgcagtggctggaagctcaagtggcatacacatatacgctgttcccacgcgtccggcctcaggagaggtgttgaagaaatcttcaggacatactgatgtagaggtgtggatactacctacattcgacaactcagcctggtcgatcatggcaatctcattcatatcgctgcttgccatgtctgctgtattagctacgtgtttctttgtgagaaggcatcgaataaggagagaccaccctagaatcccagaagctagagagttccatggaatgagcagtcagttagttaaggctatgccaagtcttattttcacgaaagtgcaagaagataactgcacatcatcgatgtgtgccatttgtttggaagactacagtgtcggagaaaagctcagagtgctgccttgtcgtcacaagttccatgcagcttgtgtggacttgtggctaacttcttggagaacattctgccctgtatgcaagcgagacgcgacgagtggagtatcagaacttcccgccacagaggctacccccttgctttcttctgctgtccggttaccttctcagccatcttcattcaggtcgagcgtggcagcctccccacccaggccgataagccggcatccttcatcgcactcggtttctcgtgcttactctgtctctagtaccccccactcccccaaccccttcagatctcacacaaacttacctggcgtcatccatgcaagcagaagcaccgcagaccttgcaaacatgtcgtctccccaccctcgcatctcacacttgtcgtcgtcgacacactccctcgtcggcagccacctatctccaccaatcagcataaggtatccattgccccattctcggcatgaatcgcccagtccacacgtcagttcgccctacatctcaaattctggctacggttcttcaagctactactaccttggcggctcgagccagcacgggtcgtacctgcggcggtgtggagagtcagggccaagcctgtctaccatggtccctcggtcatcgcagcagcagttccagtcagaggcaaacgtggccgcaggcgcgtcgtctgcccagtcctcacggcagtcctacctgcgacgctgtggcgattcagacgccagcttgtctgacatggcgtcagcccagtcgttgccggggtgctgaggcagatgtgcactacaagatgcggcttgacctgtgcatacaatgaggcttgcagcgtcacataggtggggaacatgtatagcatagactttatgatcctgttcttgtctgtgagtggtatatggttctttttttgtgccttttattgtgtgcatctgacgtgacaggagcctgttgaagttgattctgttaacattttagtccgcaccatgcgtccatgccaacttctccctagatttgctactctactaccatgcacacatttgaacgaggcagtgctcagctgcatgcatctgatgttaatgttgtgctgctcgctcagtgagcatgaagagatggtcgtctgagcaaattcagaaaacagccctttgtctg

SEQ ID NO: 5421 - DNA, 3231 bp, Zea mays
  misc_feature (3130)..(3130): n is a, c, g, or t
cggacgcgtgggccgagcgcagccaaacccaaaccctcctccctcccggctctcgacgggcgacggcgatggccgccgcgacagagaagacggctgaggacatccgccgcgagctccaggagctccagcgtcagcaccgcgagatcaccgagcgcctgcgcgacccccgtggccttcgccgcggcgcccccggccctggtcctggacccggggccccccgcccgctccgcggcttcgcgagacccgctgtgggtccggaatcgggggatcaacctccgcagaagcgtcggctgctatcagccgtagttaaggtatcttctttttctgcttcaatttcgcttctgtttccgcacgcggtaatggtctgcttgtcgaaacaataaaattatgtctggttgcttgacataacaactggaggtggatggggctgaaaataacgaggaaggcacaaaggatgcggatgcggaggggcatgggacaggttcaggtgccactgaaggcagtgccgggaggggtttcaacaatggcgggttcagaagggatggtggcttgcggatgcagaggagagtggactataattcgctgccagagccagctccaagggagcttcccaggaatgaggacccgaatttggtgagaagaaataagaggatgctggggcagcttcttgtcggtacattagagaaatttcaacaagaagataaaaaactatctaactccgaggcttttctgcgtagatcagagactcagcgaaaggctgagcaaaaggtccgcgaagaaagtgaaaggctgcgacagaaggaacgtgagcaaattgcagagaagcgtaagcgtgatatgacgcttcgcgctcgtgtagctgctaaggcggaagaaaagaggttggagctgttgtacattcagtggactgagcaccataaaaggctgtccaatttcttaaggttatttttatttctggtccaaaagtgtccatattgacaattaaattgagggaagatacattctaattatgcagacttgatgtttgataaccattagtgtatctatttacattgtatactgatgaacaatatttgttccatgtttgactctatcttattacccccttatgttggcaggacaaaagctgaaccacctatttactacatgccaactaaaccaattattgacgatccagccattgttgaacagaacaaggaaaaggtatatcctagtatcttttttctcgaaaagcgcaggagaactgcgccccaaatatatattaggaggaaagaaaaggtctaagaagacccaaaatacaagacactccttacggaggccagaagcaaccatacaggaagggatccataacacagtaaaaaactacaaaccacttagccgtagcccttaagcagtaggaggggcagccaaaaaggaaagacctttggcaccagcaatctgccatttttgcatttcctcaactaccaactcaaggagaagagtgagattgggagatattccatccaaaaccactctattccgatgtttccagatcatccaggccccaagagtgatgcgggagttcagacctctcttagtcattccagtaacaacagcagatgtcctttcccaccaatccaagaaggaagtagcagccggctgtggggctaaggagtgcaggcccaacttccttagaaggttataccagaaaactcttgtgaatacacaagacgctaacaggtgattgatagatttaggttcttgatcacataggggacatctggtaggatgattcaatcctctttttgccaacctgtccgcagtccaacacctattgtgggccactagccgtatgaagaatcgacacttttgtggagcccatgatctccaaacccttttgtaatgcccaaaggagcttgcttgacccaataaacaggcctttgtaagctgaactcgcagaatatttgccattaggtgccaaggaaaaaatgtgcttgtcttgtgcatactcatgtacttgttcctgtttcatgacttttcgtttgtgggtgaaatggtgaattaaacgttcgaaaaacgctaaaggtattcgaagaatggaaatctatgcgcagggatgagctgactcggttccaaaagcaagttgaggagcaatatctctcaaatgtggagaggcagctggagaggatccagaatgcccggaacgctcgaaaggcgaacgggcatgctaacatgcaagaaatggacaaggagctggacacacacagggcggagcatggtccgaagactcggcgagttcctgaggagggcggtaatgatgacgacgaagacgcagaggacatggctgcggaagacgaggtgatggatgaagttctgggcatcaacgatgggatcaacgaggacccatccaagccgtccgaagaagctactactgaaggtggtgagcctgcacccgaggaagcacaataggattctttgttcacacaagctaggcacatagccgtacgtaccattccgtatgcttagttgccgtattgttgggaactgtttgtgcgtgtatttctgttagacgttccccgctggtttaggctgtgttttataatgctgttttgtctttttgaatgttgagaccatacaactgtcgatcattatctcataattgttgtaaaaatactataattgataccttgatttggacgtcggtggcgttaaacgtttcgggttctgttcttcactacccgtgctgcagcctctagcgcacctgcacgttttctctcgtgccttgcccactccggatgccacagaatggttatatttttaacatgctcgcatgttttccattagtctcttttaccgttcaactcaaaagcagctaaatagaaaggtgtaaacgtgaaaataaatgggtggggtgtaaacgtggaaataaatgggtggagtcatgaagatataaataaagtctctgtcaaaattcgaacttaaaactgataccattcgaactcaaaacctctgactttgatactatgtttcaatgaatgcactaatcaattcaatctaaaaatttaaactgatgaaaaaagttagttaattcctttatacatttcgacatatgctattaaagttgttgcggagaaggtttcacctatgttgnttctccaaatagtgtagttgggcggcaacctttgccgcagagcagaggtgagtaggtgaccggaagagaaatatgatatgccaggataagaaaggaaagta

SEQ ID NO: 5422 - DNA, 1873 bp, Zea mays
cattgggtacctcgaggccggccgcgccggctgcttcccggccccccgccccttcttccccgactcgcccggcgctgaataagattcccctgtattctgttccagagatgagctgatcgagcagcccgtcgccaagccaaccggacatggtgagcgacggcgcgcgcgggctgctgggcgcgtacgagctcgggcggacgctcggggagggcaacttcgggaaggtgaagcaggcgcggcaccgcggcagcggcgggcagtttgccgtgaagatcctggagcgcgccagggtgctgtcgcagcgcgcggacgagcagatatgccgcgagatcgccacgctcaagctgctcgcgcaccccaacgtcgtccgcctccacgaggtggctgccagcaagacgaagatctacatggtgcttgagctcgtcaacggcggcgagctgctggacaggattcaggcggccagtgagggaaagctcccggagcaggaggcaaggaggctcttccagcagctggttgatggtgtaagctactgccatgaaaagggcgtctgtcacagagacctcaagctggagaacgttcttgtcgaccggaagggaaacatcaagatctctgatttcgggctcagcgctttaccgcaacatctcgggaacgatgggttgctgcacacgacctgcggtagccccaactacattgcccctgaggttctgcagaacagagggtacgacgggtcgctatcggacatctggtcatgcggggtgattctctacgtgatgctcgtagggcacctcccgttcgacgaccggaacatcgtcgttctctaccagaagattttcaagggcgatgctcagatcccggagtggctctctcccggcgcacggaaccttctccggaggatccttgagcccgacccggcggagcggatcgccatggcagagatcaaggcgcacccatggttccaggagcactacgtccctgtccttcctccgtacgacgacgacgacgacgacgacgattcagtgaagcaaatcggtgcgggtagtaaaaccactcatcacatcaacgcgtttcagttgatcggaatggcgtcgtccctagacctctcagggttttttgaggaagaggacgtgtcccaaaggaagatcaggttcacgtccgcacaaccgcctgaggatttgttcgccgagatcgaacgctctgcgactgacatgggcttccatgttcacagagggcatagtaagcttaggctgacgcgaaactgcgaccggtcgaagaatcagaagaaccctatgtcgtcatcgtcgtcgtcgtttctagtctgcaccgaggtttttgagcttagcccctctttgtatgtcgtggagctcaacaagtcccatggcgaccctgcactgtacaggcagctctgtcagaggatctgcggtgacctaggtgtgctcgagatggaccagatctttgggacgaggccgccggtcgccgacgatctcgcgggcttggccttggcgttggagagacgatctgcgacgcctttggttgcgttgtgacgaaaggctgcccccgccggcccccctgaccgtgatgtttgtagcgtcagattatttagtgacgacgaagcagttcagctgcaacgcagctcggaacggttgtgtgatccctcccagaaatagaggacaaggtaaaagagtgtagccgtacacgtgtaggatcatgctccaatgtaaataaagtggtagtagccaccgatgtaaaactgaatgtaaaatctaagaaataaatcgtttatccagtacacagaagctctatagtgacggtactagagctatttgtactaacgtttttcagtgcaaaaaaaaaaaaaaaaaaggcccctagggcc

SEQ ID NO: 5423 - DNA, 3505 bp, Zea mays
  misc_feature (2202)..(2202): n is a, c, g, or t
  misc_feature (2714)..(2714): n is a, c, g, or t
  misc_feature (3063)..(3063): n is a, c, g, or t
tgcagttcttcgttcaaagttgttatgttctatgtcggcctcgaacaagctgctgcatctcttatcatataatcacggatcaaattctgataatattcacttgtacaaaccgagtacaaatcatccagaactttacgaagcttgccttcccagattttctttacacagctttacgtatttttccttgattattcaatcttttgctgacacatgtttcctctgctattagtcactcaccaaggaggaggagaaagaactcaaggaaaccttgcaggatatccttggggaaaacaaaactattttggttgaacagaaggtaactgcttgaaccacgagcttcttgagagtaatatatgaagggatgctcctcaactgtgccgtctctgttgaagattgactacagcatcatgggaggattagtgattgaattcgggcagaaggtgcttgatatctcaatcaggaacagggcgaagcaaatggaggcgttcttgaggcaaccacttgacttctaacagccttttggataaaagaagcatcatcggaatgcagaggctgtcctgttgaaggttttcctgtgtctgcaattttaatctggccttttgaataaaatgtttcctctaacaagtgaagggcactgtttttattgtctcgtgggccacagatgcctgctgaacaatttatgttcatttcttcttttcttaaagaagcatgcactaagaacatgaaggatgcatgtcatggaaagtttttgaaagtcattgaaacgtatgagctcctcatgcaatgcattattctccttatattcaaaaaaataaattaaggttcatcgattgcaaatgaaaaaaaaacgcgctaacaagtgtcacaatatgtcccttgatgtttggttgtgtgtgctcctgtacgaagaaaaagcgcgccaaaaaagtggcatgtagtagtctagtacttaattctgaaaaaataagtagaataggtacgcccctgacgcgtgcccttgctttcttccctgttttgcgtaggctttagcttgagaacaagaggcacgtagccccttgcgagggttcagggcgagtttgcttgaaagaatcaacaaaatcgatcccccccaggccactactcggccgctcaagcaaccttgacctctcgctcactcttccaagcaaccaatgcagttatcctaagctcccagctgctgctgctgctgcttccatgtcctcgccgtctctcctcgctccctcaccatcgttgtggcttctgttttctgtctacgcgcgtccagcgatgccgtcgtcgtgcgtgggcgagaccggcctggtggccatggactgcctggtggtgtgctgctgctgcccgtgcctggtgctgcaggcctccgtcttcctcttcgtccggctacccaggaaggtggtcgtgaagaccaagagggtcatcctgaggcggtggcacaggagaaggccaccggcgccgtcaagcgcagccgggctgaagctggccgccctgctggacctggacgacgacggctttgaggccgcgttcggcatgggagagaaagagaggtgcaggtgcttcgctgtcggcggcgacggcggcgtcgacgtcgacgtcgacggcgtgtgggaggcgatcattgagcaggaagggctcttctggttcgggagcttttggggccggcgtggggcggcttctgaagccgatgatcggatggatgggagcttcaggttgcctgtggcgctagagcgggtacgtgaataggcggctaaggtttttcgattcacgcagcggtgtaaatacgcgagggatttggtaattagccaaggggctcccattcagagttccgctggtcgtggtcggcatatatatttatttactcgatgactcgatcagtcaaatgcatgtacataatagtatcaacatgccagaaataatggggtgttcccggcagaatgaccaatatcacaggtaaatttagatatgaactccattgtaaacggtggctggctggctcctggctgtgcctcggtggcggtcagccggtcaatcttttgcggatttgacaaccgacgacggctagctgtgctctcctgatgattggatgacgccgtcgtcacgcgatataatacaccaccagccccggtcctatcattttgaggcctcaggcgaactaaccatagtgcaccctctaaactatataaaaaattntatgatatgtggcgaagcatattagcacttcgtaggtaaataatgatatgcattgaaattagtttttaaaatatctaagacgctagataatatacatcggtgcaaactagcacctcgcaggttaagaaataagaacaatggtcgctggataacctgaatccttattgctcgagcgtgcgtgtctagagcccagcgtagcaccctagaatcctactggcagtgggccacgcgtaccgcgtgatccgtgtgcgttagacgtccgcgtgcccagccctaccggtctgttagctacctatactattttactacttgcgtatagctcgtgctaacgctatgtttctgggaaggggtggatgacgacgatggtggcaggaggaggggttgacagcagtggggacacgagaagagagggatgaaggatattcaaataatattcaacgatctgaaccgttgattttgatgttacgttaaatatgagtgcaatttgtttagggatttaataaagattaagngtgtgtgagttatttagttggataaattttgtaaagtttaaattggtgtattatatagtgttatagatattaaatattagaccctattaattttgggccctcgtcgtcgcctctgtcgcatgtgccagggccggccctgtataccaccgaggtccagaaagaccaggaaacgtagtgcgtacgagctcacttggaaaacagcaaactcgactgatcggtttccccgacacacacacaaagtcgcaactgacacgataatcacatgaccctggagacgaaaacgagtttgactggatcactggaagaagcgatcgcgtgcgttcctcccaaggaagtagggatgaaaacngaacggtaaatttccgtaccgtctcgtttcgaataatgttttttcccgatcgttttcgaattgttcatgaaccgattaaaaacgatataaaatgatttatctagttttttttgatcgttttcgtatttttcgtttccgagtcgtgctaataccgttttttaccgttttatataatatgagatagatctagcatataatttaattaagttatagaattttgttgtgtttaagtgaatgaataagagaaaagcaaatgttataattactctaactaatatgaatgacgaaagagttatttgtgtatttctaaatcttaaaaattaggcaatacatcactttattatgtttttttataaaactacaaaatagttatttttccgactatagtttatcgttttcggtcgatttcgaataaccgacaattctgatcccgtatccaaca

SEQ ID NO: 5424 - DNA, 1586 bp, Zea mays
ggcaaggcttctccatctggcaaccggggaccggacgatcaactcatccgcgcgactccgcttcgtcacgcggcgtcgccggcctcctcccgtgcccgtggttcctgcagtgcgcagtgcatctacgaaggtgtccaagccgccgccgaaaccgaagcgaagagccaagtcccctatccccaagcgcgtcatctcggacgtgttcaaggaggcgaaagctgccaccaagaggttctccagcccgcagcggcagaggaagcccatgtccccgcggtcaccagacgacagccctccactcggcttcgcctcgctaagagcaccgagcaagctgaagatcaataccagagcatcctcatggccacgaacaaaccttgacagtggaccggcaagagttgctgcgccggagatccttgagaggtggacggtcgatcgctccgagttgctcatcggccatagatttgcatccggggcctatagccgattgttccacgggatctacaaggaccagcctgttgctgtgaagtttatcaggcagcccgacgatggcgaggacgacgaactgtctgctaagcttgacaagcagttcacttcagaggttacaattctggcaaggctccaacatcgtaatgtcattaagcttgttggggcctgtaattgcccgacggtcttctgtgtcatcaccgagtttctgtccggcggttctctgagggctttcttgcgaaagctggagcgtgaaactcttcctttggagaaggtcatttccatcgctctggatatcgcacgcggcctggaatatattcacctccaagggattgtgcaccgtgacatcaaacccgagaacatcttatttgatggagaattctgcgctaaagtcgtcgattttggagtggcgtgtgaagaaaaatactgcaatttgttaggcgatgatccaggtacttatagatggatggcaccagagatgtacaagcacaagccatatggccggaaggtcgatgtgtatagctttggacttgtcttgtgggaattggtcactggttcactcccttatcaagatatgactccgcttcaggcagcttttgcggttgttaataagaacttgaggccggctattccattgagctgcccagcagcgctgaagcttctgatcgagcaatgttggtcctggcaaccagaaaggaggcctgagttccagcaaatagtttcagtccttgaaaacctcaagacagttcttgaaagagatggaacactcgacaagatcccaagctcgatctgccaggccctggaacccaatgaccagaacaagaagaaggctggcaactggatccagaggctgtcatacgctcaacctgctttctccggacctccacccccaaagttactctagttacacgtcttcttgttcttagcagcttggtatctggtactccagatagcaagtgtgtaaattgaatctttcttggtttcgctgggagaccagagatttcttcatggtatatactcggatacagtacatacatcatttttgggggcagtgggagcacagtaaatacttgtttggctatcttaaccaattctatcttgatgat

SEQ ID NO: 5425 - DNA, 1250 bp, Zea mays
cccacgcgtccgggccaagatgatgctgttgtggccatatctcgtgcagtgaagagagcacgtgttggccttaacgatcctgatagacctattgctacgctgctttgctgtggtccaacaggagttggtaaaacagagctcaccaaagctctagcagctagttattttggatcggaatctgctatgcttaggttagacatgagcgagtatatggagaggcacactgtgagcaagctcataggctctcctccagggtacattgggtatggtgaaactggtactttgacagaagcagtcaggagaaaaccatttactgtggtattgttggatgagatagagaaagctcaccctgatattttcaacatccttctccaaatatttgaggatggacatttgacagactcacagggtcgcagggtttccttcaaaaatacgttgattgtcatgacttcgaatgttggttcaacatcaatttcaaaaggaagacagagcataggtttcttgaaggaagataccgagtcaggctcatacttcgcaatgaaatccttagtgatggaagagctcaaggcatttttccgtccagagttgctcaatagaatcgacgagatggttgtgttccgtcctctggagaagactcagatgctggccattcttgatatcatcctaaaggaagtcaagggccgacttttggccctcgggataggtttggaggtgtctgatgcaatgaaggacctgatatgccaagagggctacgacaaaagctatggcgctcggcctctgaggagagctgtcacccacattatcgaggatgtcatcagcgaagcgattctttttggcgagttcaagcccggtgacacgatactgatggacatcgatgcagaggggaagccatgcatgggccatctggaccaacagatcgtccaggtctctgacccaacacgggcaatctgaagctgtgttggaccttttccagtgtagtagattagggatctaaatcttttattctttcaagatagagattattaattctttgttacgtagatatatagagtagtatttcattatgtatatatatcaaccagatgatccagataggggaatctggtcagtcattggagttatttgaaattttcatccagctgtatgtatattgttgaattgtttctgattcaactggccatatatatcatcattaaactatcttcatcggcttacgagcctagttctcctctctctctctctcctcgtgc

SEQ ID NO: 5426 - DNA, 1211 bp, Zea mays
gcacgagaccattacctagaacatcctaatcgaaaaacccaaacgaatattatagaagctggctgaaaagctgagtgtttggcagtccgcagtagcttttggtggcctaccgcgtggccgggtgggatccattgtcggttgtcgcctctgaccgtaccacctctgttacctgcaccgccgctccgttaaatcgcggcccgatcgccgatgcctccccgccccgtcccactattctctcgcctgcgcttccgcctcccgagttgcgccgccgtctccatctccacccctccatcctccgcggcgcccctgcactacggccatcgcactcccctcgctagcccttttcctctgtccccaccttgcccgcgcatcctccgtgcggccgtcgcggtttcttcgctggatctgcgcccgatcaccggcgggttcgcgctattcagcatggctgctgcctcctccgccacctccgtccacgacttcaccgtcaaggatgctagcgggaaagatgtggaccttagcacctataaggggaaggttctgctcatagtcaatgttgcatctcagtgtggcttaaccaattccaactacacagagctgagccagttgtatgagaagtacaaggaccagggttttgagatccttgcattcccatgcaaccagttcggtgggcaggagcctggcactaatgaggagattgtccagtttgcttgtactcgcttcaaggctgagtatccaattttcgacaaggttgatgtcaatggtgacaatactgcacccatttacaagttcctgaagtccagcaaaggtagtctctttggcgataacataaaatggaacttctccaaattcttggttgacaaagaggggcatgttgtggagcggtatgcaccaacaacttccccactgagcatcgagaaggacatcaagaaactactagggagttcttaaaccttgtaattggattcagtagccctaccaaactgctgctttgcatcgagcacctgatgcctcagtagcgttttaataaagttgtttttataaccgagatgttttgtatttcttctgtattccctgctttgtggtaaatggcatgtaataaaaatgatgcaatccacgatttatcttgaaaggttatgtatccaggttggttgttatgagataaaaaaaaaaaaaaaaaaaaaaagggggcatatcttgcgtacctgcctacc

SEQ ID NO: 5427 - DNA, 2492 bp, Zea mays
  misc_feature (2411)..(2415): n is a, c, g, or t
aaaatcaactcgagcaaagcagctagctagctagcgctagtaccatcgtgcgagtgtgagcaagctactgagagatctcggaacgttgcttgacagcttgagtaggtaaataatctatggcgcgccgacagtggagcagcggcggcctcgcggtcgcggtgctcgccgtgctgtcgtccgtgctcatctgctcatcgggccacccggtgccgggcgggcacggcggcgggctccccctgcagccgcacttctacggccacgcgtgcccgcagatggaggccatcgtggggtccctcgtggcgaaggcgcacgcggaggacccgcgcatggcggcgtccctgctgcggatgcacttccacgactgcttcgtgcagggctgcgacgcctccgtgctgctggacgccgacggcagcggcaggttcgtcaccgagaagcggtccaaccccaacaaggactcgctccgggggttcgaggtcatcgacgagatcaaggccgcgctggagcacgcctgcccgcacaccgtctcctgcgccgacatcgtcgccgtcgccgccagggactccgtcgtcctgaccggcggacctggctgggaggtgccactggggaggagggactcgctgacggccagcctgagcggctccaacaacctcatccctgctcccaacgactccctccccaccatcatcggcaagttcgccaaccaaggcctcgacatcgtcgacctcgtcgcactctcaggggggcacaccatcggcgactcgcggtgcgtgagcttccggcagcggctgtacggccagaacaacaacgggcaggtggaccggacgctgaacccggcgtacgcggcggagctgcggggccggtgcccgcggtcgggcggcgaccagaacctgttcgcgctggacctggtgacccagttccggttcgacaaccagtactaccacaacatcctggccatgaacgggctgctcagctccgacgagatcctgctcacgcagagccgcgagaccatggacctcgtccaccgctacgccgccgaccagggcctcttcttcgaccacttcgccaagtccatggtcaagatgggcaacatctcgccgctcaccgggagcgccggcgagatcaggcacaactgcaggagggtcaaccacttctagcttccatggagtggccatccgtgcagtggtgttcttgctttggtttcatttctggatgcatgcgtcatctttcatacttggatttaagtgtgcagtagtcgtaaatgattggaatttctgttttagtttggtgcccattcgatctcgagtcgattttcactcatgtaatttgcaaatcttgtacgaagaaatgatccaataaaattcagcatttgtgtcaaaaaaaaaaaaaaaaaaagtaaggatggtatgcatgggtaccgcggctttttccctttggattttacactcagtcaaaggcagactcagcccaagatctgggggggggggggcacgtctaaatgggggcataaatagaggtctacttatcaatgtatctataagtaaataagataggggtccacaaaaccagaaaaacgagtggagtttgtgcccccactcgccacaacgtaggtccgcttctccttctcccctagtatgtacactttgctaagttctacctttgtctcattggactgttcagttttcgcctcaaccgacaaacgacgcttgaccctgtgctatacccctaccaccctcttgtgaccataccttattacccgatcgaccagccaacgctctagcctctagaaggccctgaccggccatcgtctctcaggtctctgctcattgagagcacctagaggggggtgttgaataggtgatcctgcaaaattaactctaaccaacacaaacttggtttataataggtgttagtgagaactaaaaccaagcaagtagagttggaaaggagaagagaactcttcacttgattgctcctttaagatgagtattaaacttaggagcaataatgcaagtgaaatatgataactctttggaagacaataattgcaataaaaataaatgcacaatagacacgacgattttatcctgtggttcggcaaaatgtgtactccacgttgtggtgacctcctttggtcaagggttgcactcaacccctctcaaatgatccaaagatcaaacttgagtatcatggttttcttccttatatcaaatccctttgtgaggaatctctataagttggagccgctcatgtcttacacaaatgatctcaatcaaagcacaagagtaaggagggagtagagacacaaacaagagtacaagaacatcaacaccacacacacaagcaaaggagaaaccacaagaatcaaaacgacatagtttctcccaagaaaacgctcagttctcgctagaatnnnnngaaagcgtggttgcattgaattgaagtttcggtgtgctcttggtatgcttgggttacagctccatgtgcctaggggg

SEQ ID NO: 5428 - DNA, 1711 bp, Zea mays
  misc_feature (1580)..(1602): n is a, c, g, or t
  misc_feature (1640)..(1686): n is a, c, g, or t
  misc_feature (1694)..(1700): n is a, c, g, or t
acattcattgggtacctccgggccggccgccacttctgtagctgtagactgtagttctgttcctcttcctccccactcactcctgcgcttcctcgccgcgcggttccttctccctgatcctcctttggcttcgcggttcatggcgatgtggagggccgccgctaggcagctggtcgaccgggcgctcggctcaagggccgcgcacacgtctacaggcagcaaaaagatagtcggggtgttctacaaggccggggagtatgccgacaagaaccccaacttcgtcggctgcgtcgagggtgcactcggcatccgcggctggctcgagtcgcagggccatcagtacattgtcaccgatgacaaggaaggccccaactgtgaactggagaagcacattgaagacatgcatgtcctgattaccaccccattccacccagcttatgtcactgcagagaggataaagaaggcgaagaatcttgagcttcttctcacggcaggaatcggctccgatcatattgatcttccagcagctgctgctgcgggcttaactgtggctgaggtcactggaagcaacactgtctctgtggcagaagatgagctcttgcgcattctgattctgctcaggaacttcttgcctgggtaccaacaggtagttcaaggcgaatggaacgtagcaggcattgcccatagagcttatgatcttgaaggaaaaactgttgggactgttggggctggtcgtattggcaggctcttgcttcagcgtcttaagccctttaactgcaacctgctttaccatgacagacttcagattgacccagagcttgagaaagaaattggggccaaatttgaggaggacctggatgctatgcttccaaagtgtgatgtgattgtgatcaacacacctcttacggagaaaacaagaggcatgtttaacaaagagaggattgcaaagatgaagaaaggtgtaattgttgtgaataatgctcgaggagcaatcatggatgctcaagcagtcgcagatgcatgttctagcggtcacattgctggatacggtggtgatgtgtggttcccacagccagcaccaaaggatcacccctggcgctacatgccaaaccatgccatgacccctcacatctctgggactacaattgatgcgcagctgcggtatgcggatggtgtgagggacatgctgaataggtatttcaagggcgaggacttccccgtgcagaactacatcgtcaaggaaggccagcttgccagtcagtaccagtgaccgcgcgagatgttgctgtgccgtgtaggcttttctggtgagaagctgcgaggaagaaactcctgttgcgtacttgcgttactgtatgagtagctctgagaaacctgtcagcggccacctgtaataaaagaatgccttgctggtatctcaccgtggagatcaataagtctcttttttttcccttctctgtcactgaactgcatgcactgtcttttttcggctgtgacaacgcaaatggtaacgaactgcatgcgctaaaaaaaaaaaaaaaaaaaaaatttaacaagcacatggtaatgaaatcagaaannnnnnnnnnnnnnnnnnnnnnnagagtgcctccggcggggtaacctgttttcaaagagannnnnnnnnnnnnnnnnnnnnnnnnnnnnnnnnnnnnnnnnnnnnnncttctagnnnnnnnccccgggccct

SEQ ID NO: 5429 - DNA, 1169 bp, Zea mays
gcacgagaccattacctagaacatccgccgcccgggatggaagggagacaggcgaatagaggacagctgagctgcagcatcccgtccaacagcaggaccagcgagggtgtacctccgcctcgcgagtcgggaccatgtggacgggcagcccgctgctccgggacgttggcgccgccgtgctcacgggagtgggcgcggctgccgtgctccgcttctgggaagagatcgccaaccgcgccctgctggaccagaaactctgcaggaaactggtgcacataactgtaggattagtgtttttccttatgtggcctttgttcagctcagatgatgtgtttgctccatctctcgctccgcttatcatcatcatcaacatcatgaaagtgacagtgattggacttggtttcgtgaaagctgaaggtgtggttaactccatgactaggcatggagaccgcagagaacttctcaagggcccgctgtattatgcctgtgctataactctgacaacaatagttttctggaggacatctcccatctcaatcgcggtgatctgcaatttgtgtgccggagacggtgttgctgacatagctgggagacgattcgggcatgttaagctccctcacaaccctgaaaaatcatatgccgggagcatcgcaatgttcttggcaggtttcatcgcatcagtactgttcatgtgctacttcaacattttcgggtttgttgagaagagctggaccatggttgctgcctttggtgtgatatccctggctgcagcagttgtggagtcactcccgatcagcacacgccttgacgacaatctgacggtttctgtcgcatcagtgctagttggcgcccttgttttctattccattggagccagaaacctgtgctgcatgagcagcgaagtcaggagaagtatcccagcaaccgttggaatggtgtttgcaggcagcagctgaaacatgtagccacagtccaggagcagagttgagcagaaagtgcagagaaaggagttcttcaatcctgatgtgtgtgtatcttgtactgtaaccattttcctgtctaagcagacattcttgtaactttattaagaaagaggtaaagcgagaataagttcattagggaaaacagaggatgtgctctcataagcaaatgcaaaaaaaaaagcggcc

SEQ ID NO: 5430 - DNA, 921 bp, Zea mays
gtcgctgatgtgtggtcatgtggagtaacgctgtacgtgatgctggtcggtgcatatccgtttgaggacccagatgagcctaagaatttcaggaagacaattcagagaatattgggtgtgcagtactcaattccagactatgtccacatatctccagagtgccaaaatcttgtctctaggattttcgtcgccgacccagccaccaggatcaccatccctgagataaggaaccatccatggttcttgaagaacctgccagctgacctaatggatgacagcacgatgagcaagcagtacgaggagcctgagcaaccgatgcagagcatggatgagatcatgcagatcctggccgaggcgaccattccagcagctggtccccgtggactcaatcagttcctgaacgacggccttgacctcgacgatgacatggacgacctggactcagataccgatcttgacctggaaagcagtggggaaatcgtgtatgctatttgacagcagcgaggcaatgcgtatcatcagtcgtgctcagatcgtttgttgcgccgcaggttaccgagataattagagagacaggggggaggtatctgctggagatgctgctcgtgtctgatgccgtgatgccccccttttttttcatcctgttatgtttggctgttgtttggttgtggtgcacctccagtgttttacaacagtttggcccttcggaattggttgtgctagaacctcgtccatctaagaagaccctttgtttttgcatccccagctaagagacagtgaagtacttgtataattatactgtttgtgtcatatgtatttggtgtaggaaaataaagaaactccattgcccgttcttgtacaaaaaaagacccacgaagcggccgagaaccctctcaattttagtgtctttttggctgctgt

SEQ ID NO: 5431 - DNA, 1289 bp, Zea mays
cattgggtaccgcccgggcctccctcgttatttccgggctccctcctgtgtacaccactcccgccccgcctaccattttatccccgcctctcctggcctctgccgccccgtcgcacagaatcgcttggtgcaccctgcgagggcctcctcgaaaccctagcttgcccagcccctccgggccatgggcaagtacatgcgcaaggccaaggcttccagcgaggttgtcatcatggatgtcgccgccgctccgctcggagtccgcacccgagcgcgcgccctcgcgctgcagcgtctgcaggagcagcagacgcagtgggaggaaggtgctggcggcgagtacctggagctaaggaaccggaggctcgagaagctgccgccgccgccggcgaccacgaggaggtcgggcgggaggaaagcggcagccgaggccgccgcaactaaggaggctgaggcgtcgtacggggagaacatgctcgagttggaggccatggagaggattaccagggagacgacgccctgcagcttgattaacacccagatgactagcactcctgggtccacgagatccagccactcttgccaccgcagggtgaacgctcctccggtgcacgccgtcccaagttctagggagatgaatgagtacttcgctgccgaacagcgacggcaacagcaggatttcattgacaagtacaacttcgatcctgcaaacgactgccctctcccaggcaggtttgagtgggtgaagctagactgatggattcagagggacgagagagcagcaggcatggaatggaactcaccccccgctccctccacaccaccccagcgttgtggcagaggcgcataccgtcgtgttagcttcgtttctgctgtaaaaaaaaacccttagtgttttatttagcatgtagccttaactggtcgtgtgttacagtacagaactgatgctgagttacaacaccctgatctgatccctcaactccaatgtaacccttaacagctcattctgtaaggaacctgtcaccctgttacctgttgctgaactaatgaagtagagctagataatgacgttttatcgtagttattattaataactcctcccctgtggtggcgcccctgaaaaaaaaaaataaggaactaccatctgaagatgacatgggcaacaaagaaagtttgtcacaatgcacttggtgactggaaaaataaaaaaacaggggggggccgctttaaaggatccaagcttacctccgcgtgcatgcaacgtaatagtttttttatagtgccacctaaat

SEQ ID NO: 5432 - DNA, 1866 bp, Zea mays
atcaaagatcggctgcctgtccgctgttgtctttttaattgcctgtgcctgtgctgcccccattcctttctcctccagcaagtaaaccccgtttccacaacgtcaccgcaccgccgtcatgccgaccgtaagcgtgaaatggcagaaggagctctttccaggcatagagattgacactagccagcctccgattgttttcaagactcagttgtacacactaactggtgtgccacctgaacgccaaaaaattatggtgaagggaggaatattgaaggacgatgcagattggtctactttgggagtgaaagatggccaaaagttgatgatgataggcacggctgatgagattgtgaaagctccggagaaaggtccagtgtttgttgaggatctaccagaagaagagcaagtgattgcactgggtcacagtgctggtctttataaccttgggaatacatgctatatgaattccacattgcaatgtctgcattctgttccagagctgaagtcagcgctgctaagctattcagatactgtaagaggtaatggcattgaccaagcttctcataatttgactgttgctactcgtaatacctttggtgatcttgatcaaagtgttcgccctgttgcacctctacaattcttgcagacactgcgtaaaaaatacccgcaatttgcgcagcagcataataatgtctacatgcaacaggatgcagaagaatgctggacacagttggtgtatacgctttctcaaactcttacctcagattcaagtgaatctgcagctcttccgatgaagcaactatttgggatagatctcgtgagcagggtccactgtgcagaaagtggtgaggagagcatggagacagaatcagtatattcccttaagtgtcatatatctcaagatgtgaaccatcttcatgagggaattaagcatggcttgaagacagaacttgagaaagcttcacctacactgggtcgaactgcagtttatactagagaatcaagaataaatgagctgcctaggtacttgactgtgcagttcgttcgcttcttttggaaaagggaatcaaaccaaaaggcaaagattttacgaaaagttgattacccactggaattggatgtttatgaattttgctctgatgaactgaaacagaaactccaagcacctcggcagatgctgagagatgcagaaaatgcaaagtttggattgaaagcacaagggaaagctagcggctttaaagaaaatgagggatcatccagtagcgctggggaatcatccagtatggacattgacaaagctgagtcttctctaccaaagaaacaattaactggcgtctatgatttggttgctgtcttgacacacaagggaagaagtgcagactctggccactatgttggctgggtaaagcaagatgacggaaaatggatcgagtttgatgatgacaacccaaacatccgcaaggaggaagacattttgaaactatctggtggaggtgactggcacatggcttatatctgcctatacaaagcccgcatggcggagttgaagagttaggccggagtggttctacatttctgtgccgcgaacgcaacactagtttttctgcccatgagtgatcatggtaattattttttccagttcgtaaagtggttactgtcgaatttgcttcaatgcggttggccattattcactgggatatgtatttttaggatttcaaatctagtacattttgtgttgtcaaaatatagaacgaagaaattcagaggaaagcttctgccttgacagtggatctgattgatttgcaccaagtggtttcatccgtgtcttcctaataatagtgtatttaaaaaaaaaaaatcaaaact

SEQ ID NO: 5433 - DNA, 6552 bp, Zea mays
  misc_feature (3114)..(3114): n is a, c, g, or t
  misc_feature (3179)..(3179): n is a, c, g, or t
  misc_feature (4432)..(4432): n is a, c, g, or t
ctgttttgttgtcttccatttagcttataagttttcactgaaagcatgtggcctactataacttgaactactagcctgattgtatctgtgtgcttttagcagccgatgtccactgcacaacgaagcgataggtcttctggcagtaaggtgagaggaggcccttgtctgttgcatttctgatacaatgatgtctttgagttgaacgggttttcatgtgtttgtgttttccccccttaaaaaaattgcagccatgggagatgcattcgtattcacaacagaggcctggttatggatccaactcccagttgagtgatgatggatcatactctgatgcccaggacagctatgctccttcctatcaccagaatggaaaggcccctgattttcaagcggatgaacctaggcctttgacttacaacactggggttgaggaaagaccgccaccgcagcgccgctgggtgccccctcagcctccaggtgttgcgatgccagaagcagcagctgccatacgtcaaccaaaggcccttccaaagcagccctccagcgatgcctctgaggcagctggtgagatgcaggtgaatggttcaagtgcatcggatgctgtgactgaggttcctgttaatggtgctactgcaagcgatgctggacgcagtgagatccaagaacaatcagtggcggcctaagtgaaaccaagaccagctaagaactgggaagcaatctaagagagattcaggatctctagtacatctggggggtttgtcatacatctctgaataacgtctgtatcagaacagcggggcaaccacaccgatgggtacccgtaataatgcaataagtagcagatagtttctgcatttagattaatgctacttgtacacaggagaacatatcaataatatttttttggctgttcgattgagggtgcttaaaaagtgtgcttgtgaattgttgtattttgatcttgatcttgtgatgactagcaatcgcaatggaccaaatggagatggtcgtttgttttcttgttgctgtctcgctttattccattcaggtgttgttttttcagggtctgccaagaatgagaatgaatccattcaggtgttctccaggggctatttcctgcgtttgccagggatgagaatgaatggcggcgtacacatggattgttttcgtcagttcatgatctccccagacccttgtcatcgttcaaattcagttggatatttcttttttgttttgttttgttttgttttggagtacaaagtgttaacttatgacaggattccaattattgttgttgtctcaggtcaaaggtgggataccaccagcaaaggaacattaccccgacagaggatgataaaggatgctagtgcggagtaccactagatagagcagcgatgcatgtaggtctaccatttacacaaatgcatggggagagaaaccagccgctgaactggtggatttcaggatccatttacaaaagactgacgatcagcagctacaaggaacatgggtcagtagctgaacgacctagatgcatcctaaccatacagactggtcagtggtggattgcatgatgatctgtagcagatgcacgctgcgcttgcagcaccttgtcaaccttggcaagaagatgttgcatttctcccacaagactgagactgtccacggccggctttgcattcgcttcttgaggtgacttggctttagacgacaaggacaagatcatcttcccaagattgttcctaatatctgtgagagggagctttggaagaggcgtgatgggagggagatcctggacggtcggtgctgcaaatgcgccgccaagagtcgcggcacagctcaaggcgctctctgcttgagccctggtggcgaacaccacgcgcgcggtgtgcttgttcttgtcttgggtgatgctggtctcggagtcgatcacaaagccaaacctgctgaatgtggagaggaggtcctccctggagggcagcggagttccctctgccaagtccagcacaagtgccacaggattcccgacatagctgtgctgcccaacggtcttcatcgtctttctcttcctcttcttggtcaaggacgatccgtcgtctgggcctgcattaaggttgagcatcatcttgcggccaacaccagcagctgatggaggcttgctgacaccatcgtcttgggaggcaccgcccgcggcagcatgtgaatcgggatggtcgtcgacgaaaatgctgttcctgttcctgctatccatggccatgaaacggagggctgccgcttccatccccttaccctgcccgagcgctgaggctcggagagtggggagcgcctccgcgccggagacatggggttgcccctcctctcgctgcttctggctgccggcggccttcttttcttggaggacgcctgtgtcggtgtagggaggggagaggtacctgcttctcttgcgctctctcttggtgacggccagggctgcctcgtccacggccggatggatcagctggctctggctgccgccgctcccctccatagccatggaaacgggcggcacgcggcagctggggcggccaggggcgacgggacggggcgggacgtggcaggacaagagtgaagtcaccgcagttgagtgcagggcgccagggcggacccgccactgtttggatcgagttttagggggttggaatcggctagagctgttaaaggctttgctttttcgattaggatgttctaggtaatggtctcgtgcatggattagatgggattggaaaaaattgagaagaagtttgacttatttgagattcaaactcatccaatctcactcaatccacatggattgagagctaaccaaacatgccctaattaaaatttatataaattagagaatcaattcggttaggaatcgttccgactcatcaatccggcacaacgaacaagaccttatggggttagaatcgggctttgcttctcaacctatttgtatgagaatcgtttatatgaaaatctctcaaatcaatatgaatgtacgattcgtcaagtcattgtaaatagagaaatctatcaattaagctctttaatagcctaaaccgacaagagctccataagagagagagaggaatngagtacttctcttgatataacatgcgagacaattacatacataaggtggtgaaaataaagtacanatcacatcggtgctttgtggttgcattgtggtttagggttacagaagatatatactagtttcctctggtagctagtgcatgcttaatcatcatatgcgtgcgaggtgaatggggcatccgtttctgagcctgggaaacattgcccacttctcaaggctggggtcgtcgtcggccatctcccatctccatgttgtaacaaggtggtgcagaaaaatgagcatcatgattttggcgaggttcatccccaggcaggttctcccgcctgctccaaacaccaggaagctgtacggctgcttcgtgtgcatgctatgcccgcctttgaatcttgaaggatcaaacatggtggggttgtggtagagcgtcgcatcgtagtgtagggccctcgcatcaatgttcacaatccaccccttgtggatgtggaaccctgcgacctggcagtcctcgagtgctacccttggaaaccaggaaactatgctcgccatcctcaatgattctttaaccgtctgcatgcaaattaatgcaataagcagcaagaattaataacatttaattaatttccagcttgctgatagagatgcatatgtatgttgtggatcggacgacggacagacaccatgtatgcaagctccatgctgttgagatgttggaggagatcatgatctgcctcctcctgctgctgctgctgcttcagctccagctgaactgactgcatcaacaacagattcggattattcgacatttatctggtctggtgtgggtggactactgatgatgattattgacccacccaccctcaaggtttcttggaagactttgttgtcagccaggtacttgaccatccatgtaattgcgctcgctgtcgtcacctgccctgttatcgttgttaatttataataatacgtaagaagaagaagaacgtgctgcatgtaattaaaagcaagcaagcaagcaagaaattatatattttttttgtaggttgtcgtaccggcaatgatgagcgtcaagatgttatcgagaatctggtcgtcagtgaggaagaggtcgtcgtcgtcgttatgatgagctgacgacgatggtaaaaggtgttgttgctgctggctccgcctcctcctcctactcctgagaagaagaaggctctgcagaaagtcgtcgccgtgctgctgctcctcctcctcctcctccatgtccatgatctgtctctgtcttgatcctatctcttgcctgagcacgtccatgatccttttcctggcccngaggcccgcgtggaacctggtccccggcagcctgagcgggaacgccagcatggcccgcgtcacggccagcacgtcgctctgcagccgcctcctcgcatcgggccgcagcgtcctcccgatgagcatgtcgcagatggcctcgaatgttaggtccagcgcggcgtcgagcaccaccacggccccagtgctgctgctccagtcgcgcttcatgagcctccgcgtgaggccgtcgaaggtggcggccagggacgccgtggcctgcgcgttgaagaggggcgccacggcgcgccgcagggcgcggtgggtggcgtgggaggcgcacagcaggctgtgctcgccgaggagctccgccacggtgcgcacgtagcgcttcgagaagccggctggctcggcgcccaggagcgacctggcggcgtcggccgacgagacgaacacgtgggtggcgcccaagagcgaggtgcggaagcaggggccgggaccgtacctgcggtggcgagcctccacgaagtggtagaagcccctgccgctgctgttggcggacaggaaggccagcgtctccacgacggaccaccaccagcggctaccccttctcggtggtggtggtggtggtggtgctgctgctgctgctgcatgatcattcttcaccctcctcctcccttggaatttgatcaatcgtctgatgatcacgacgcagtagatgatgaccgctgctaagaaaaagaaaaagaagatgctgctgctgctgctgtggctttggcaggctggtggtgcttggagttggcggtgcatgtcgtccatggctaggaaggaggagggataggagtcataggacagctcctgcccatgcatcatgctctagtgtaaaagagaagaagatgagcccgtcgtcggtcacattcgcaatcactcactccacttgccatcgcaatgcaacaggagcagccaccagctccggccggcctcccggcagtacaagtagaatagatgccatcaggatacacgacgactaggacactgctgctggtggaggatccactgtccaccccccacccagctacctctggaatgtcctgtccatattcatagcatattagtgtagcgggcgtactgtgaaggcaggcgcggcgtagtggagaagactgcgcagctgcctttcctgcgatgtgttttgcacgtacacatgtactagctggtgcacattggacgtaattggttggtgggttcagccgcgccgggctcacgccggtctggccagccagcgaaactctcgcctccccttccccgctgatgcaggtgacccggtggaaaagcgtctctcgaaccaatactcgtgcaggtcagcctccgcaatatcactgcacactattttcgtcggttaaaccctgatcgtcgaaaatagtgtcttacttttggcagctgtgagtggccgtcgaaaacaatgttactttcgacggctaagtttcacggccaccaaaaaaacttagggcttgttcggttattgatattatatatgtattggaatgtattgggtgcaatttaagatgaattttgacttgttatagatttaaatcggctcaatcccacccaatatatatggattatcaccaaaacgaacaagcacttatgggattttaacatgtagccgaaacatttcttctctctttcctcgctttccttctccctccatcctctgatgtcgtctgatgtcgtgactgctgctcccgccgcatcccctggctcgccccgcccacgcgctgccggctcgtggttccacctcccgatcctgactcgtcgtgcagccgctcgctccggctcaccgtattgtcaaccgcacgcgatgttaaacttttttttttgcatattttattgtttattttcggcaaccgttttttgtttgccatcaaaaatagtgatcagcagtttatttaatgtttgatagtgattagcagtttatttaatgtttgattgtactattttttattatttatgattagttatttgtttatgcatttaaaacacaattaattacacatttagccaacgatacgttcaattattgtttgattccattaactaatataatgttgatatgccttattacttagtttgatttgattaat

SEQ ID NO: 5434 - DNA, 1429 bp, Zea mays
gatcatggctgattggtcgtcctcgtccccggcttgtcgttgagcagaccactcgtgactcgtggcctcgtggggtgggggcagaaaccagccctttctgtcctgtcagctactacccactggccactgcactagccgtctgcggagccgagtgttcctttctagccttcacttctcagcacggcagccttcgacccccgactgcagccgccagccgcgccatggagcaagccgccatgccgcaggttccccgcgtcaagctcggcatccaggggcttgaggtgtcgaagctggggttcgggtgcatggggctcacgggcacctacaacgcgccgctcggcgacgaggccgtggccgccgtcgtcgcgcacgccttccgccgcgggatcaccttcttcgacacctccgatgcctacgggccccgcaccaacgagaccctcctggggaaggcgctcaagcagctgccgagggagcaggtgcaggtggccaccaagttcgggataggtcagggcgccgctggcatgaccgtgtgcggcacgcccgagtacgtacgcgcctgctgcgaggccagcctgcgccgcctcgacgccggctacatcgacctctactaccagcaccgcgtcgacaccaccgtccccatcgaggatacgattggtgagctcaagaagttggtggaggaggggaaggtcaagtacatcggcttgtcagaggccagcccagacacaatccgccgtgcgcacgccgtgcatcccatcaccgccgtgcagatggagtggtcgctctggtcccgagacatcgagcccgagatcgtgccactctgcagagaattggggattggaattgtggcttacagtccaattggccgtggattttttggtggaagaggagtgacacagcaagtttcttctgaatctagtctgcaaaggcatccaagatttacaacagaaagcttggagaagaacaagcagatttacctgaaaatagaagatttggcgaagaagtaccagtgcagcccagctcagctagctctagcctgggttctgcatcaaggggatgatgtggttcctataccagggacaacaaaaacgaagaacctagatgccaacgttgactccttgaaggtgaagctcacagctgaggacctgaaggaaattggcagccagatacgtgcagaagatgtggctggtggaagacaatacaattcctatgcacatacctcctggaagtacgcagatacaccaaaaaagtgaagttctggtcctggaaaccttgtagcaatcacaggcgtatgcaaatgttgaactatttccctgcatttgagccggaatcgtacgatgatgcatcttgtgaacatgcggcactaataaatcgagacgaagaataatgtgttttccatcagtgattatgagcagatgatgatttttatccg

SEQ ID NO: 5435 - DNA, 3056 bp, Zea mays
  misc_feature (1535)..(1535): n is a, c, g, or t
gttcccctcccattcttctcgtacgcgatcgattgcgagttgcgcccctcgccctcgcccggtcgccccccccagtccccgaaactgctccgcctccacgcccgcgcccgctcgccctgaccacggcgatggccgccgccgccctccgctcctccgcacgccggctcctgcgcctcgccccggcagcctcgtcggctctgtccgctggttcccggcccacagccggggctgcgccgctcacgcgccccatcgccgcgctctcaggtggcaacaatcctatctcatggaaactgagacggttctacagttcaaatgaaaaacacttgcctgcaatatctgatccagaaatagaatctgcatttaaggatttgttggctgctagttggaatgaacttccagattctcttgtagcggaagcaaagaaagcagcatctaaagccaccgatgatagtgctggtcaagaggctttgaaaaatgtatttcgtgcagctgaggcatgtgaagaatttagtggaactttggttaccctaagaatggctcttgatgatctttgtggcctgactggcgaaaatgtgggtcccttacctggttatattgaagatgctgttaaagctgcatataatcgctacatgacatatctggagtcctttggtcctgaggaaaactatctaagaaagaaggtggagactgagttggggacaaaaatgatacacctcaaaatgcgatgcagtggcataggttctgagtggggaaagatctccctgattggcacctcagggatctcaggttcctatgttgagctaagggcatgatgggacgtctgcaggtaaccatggaaatcatcgatgagctgaggaagtctgtagatcagaatatgccagtactgcattttcctttcccctttctagctagcatggcaataacaatgagatcatcaaacagcggcgcggttgaaggaacttcagatactcccggcccttgtgtctgtgtctttgtctgtaataagaacgtgtatatgcgtgaaacctatcagttctgttattttttggcatgcgcctgacttcttgttcaactggtgtgagttgtatgctttgttcatgaagcactgatcaatgatcatatgccttcgcccgcaacagaacttccttcagcactgcaaaaatacagtgacctgccatttttttatgaaagggtttaacaatcactatgtgattagtgttcactaactagtggattgtagcatgttaaatcatcaattaaaaatgtgtcatgtacttaagatgatgtgaacatgagatttaatgtgtagttattgcaagaataatatgagtttacttgcccccgtttaaatcctaagatccacaataaattttagacataataagtgattaattctgaatacaaaattaactaaatattgattcagctaaaatagatatactacttgttatgaggtcgaaaaaggtggaaaaacgagtcatacgagttgcaacgaatatgggctaatcggatcagagtcagaccacaacatgcgnggtgcatacaagacagctaggctagatataggttgtacttgtatgccataagcaaaaaaatgctcatttcaatactatacaaattgaaggtgttatttggaagccttaaccactaggctagagatcatttcgatagaataggtgataggatgggttaactgatggagacaacttaagtggcctggaattatttgatacggtttatgaaacctatctctattttacatagtaatgtatcactagtacaaattctttctatatataatgtatcgagagcataactgaactgcataactgaactgtacttgcatccgactttttccgcttgattggttacccgcatcatcttgttctgactgcgtgcgttgactttatacgagtatatatttgattacatgtatgtggaagacccgaactatatgagtggatacaaaataatttattttaagatcatttgactgtctccatccatacggtagaaacgagggtattggcccagttaggctcacgcccacctggcttcgcacacccagccatccaatcatgtatttagattcttagccactcgatcatatttaacggacacaattcctcgacgtattgttagacatagatgcagatacggttcccttgtagcttctgtaacaaacgtgagagttctaaaagacaatctaatgaccgatggggaaaaggggaaaaagaaaagttgtattcgattgcaatgacaggacaatttagataaggttttttgtttagagtaaggggttagggcatgatcatcctattgttgtctctagctatctattagaattggactcatgaaaggggacttccctgactatcatgcaaccaaacatacataaagagtgcaaagcgtgtcctaatatactatatgtatatcattgattcatcgagcagagagcattggctcattgtggtgtaattcaacaagcaaacacaaaaaaataaaacatattgttgtgtgccaccaaccaactccaagcatattaaaaaaaatcattgcttactgctgcactaaggccattctaaatagatagttccatcacactgttttcaagactgccatgtaaatatctgtttaggaaatagtgcatccaaagttttgtccccataaaactttcttatcttttataaaactcgttcatatatctcttcattaaattatatgacatgtcatcttatttacttatgtaacatgtcatttaaagaatgaaactccttttaaaaatgacctaattagagtgaaggtgttttgtcctttagccaaggtccatggaaggctgtcactaatcctgactatgcaataaccgtcatcaaatgagcacgagcttcccttggaaattctaaacttttaataaatccaccaagctcgacaagaagccagaattgctaaaatcatctgtttgtagcttccatcacaccatcatttcctcatcacaataaagcagtaaggccaaaataactctcgatggttctatagttttcagagcatgaacatat

SEQ ID NO: 5436 - DNA, 1957 bp, Zea mays
cgcataatgttaatcaaattccatcttagggagtgtttgaatgcactagagctaatagttagttagctaaaaaaattgctagcggaattagctagctaacaaacaactagctaactattagctagactgtttggatgtcttcaactaattttagcggctaactattagctttagtgcattcaaacacctccttagtctggaagttgtttttttttctgaaataagtatgagggagatgttagttgtaaactgcacaatcgcctgctggcaattgatagttggctatttatctaaattccaagcatgccaataatctaatgcctcttgataagtgcttctgttaagttcgtgttattatttgttcaacaggccaggaggcagaaaaagaaaagctgatgcagtgaaggaagaaactacagagacacctaaaaggtactccttctgtcccaaattaaaattcgttttaggcttttaatggattcatacaataattgatgtatatgttttgtaggtgtctagattcgtcatcacccatttgaatatagacataaaaactaagagctaaagtgaatactaatttgggacggagggagtaagtaattgatacaaagaagtcgctcatgcatgtatcttttctgatactgttttctgcatggctccagtgatgctgttgatcatccaaagaaaagaggacgtccaaaaggtgtaagatccagcaatggcacacctagtaactcagctactccgagcacaaaggggaaaactgcgggcaagaataccaaagaaacaccaaaaactggccccaatcttataaaggaactcgagaagagctccaaggacaaagctagtgtatcaactgagacaaaggatgaattgcctaaagatgacaagagtgcaagcagacctaaggaggctattagcaaaggcaaggattcaaaagacgaaggcaagtccactgaaggaaaagctaggccaggtcggaaactaaaaaatgctggtactcctgcgggtgacgctgacaaagagaaggggaaggagaaagaagttaaggcagctgaaatagagcaggaggcaccaggaaatgcttctacaggaaagaagcgcagaaggaaggcttgaagctaacactgatggaacttcttttgtaaatggatgtgcaccttgtattattgagtgttaactcgaaatttcgtctgtttggtctctgatagttaggtgtggaagcaacatttgctatagctgtaatgctaggattaacatgtgttcattgtggtcagatgcatggtgcattggtgttgagctttgagcggaatcaacccaatgctcgctgtgaggcccatggcatcgtgttgtctggtggtgttgtagcttattgatgttctatttattataagcaatttaagcagtggattttgtagcaaaaaaaaaaaaaaagacaccaagggggcccccggtttaagttgggcacggatctcataggcccttcgataaggaagcagcaagggcctcaatctgattttttgtttagagcttgtatttggcacggctttagaaaaggcagccgtatcaaaacttcacttgagaaaaggctaatttctgctgaataaaagtgaagtcggagccttccactaaagtatttttctggtgaataattgataaatcggagtctttttgaaaatagaagagtcttaacgaacaaactcttaatatgacaattaaaatatatgatagtaacaagagtttcttcggttctcaagaaattttggatgtttctcccatggggcaccaaggtccaatgttcacattgcaaatgactgcaacctcaagttttatcagaaaggaagtcgtatacgtgtaagaccgtctccaggcaggttccgcggcaggcaggaagatgctcaatctagttgcttgtgtgctggtcggtgatcgtagtttgtcgctgcaggcatgcaag

SEQ ID NO: 5437 - DNA, 2208 bp, Zea mays
  misc_feature (2196)..(2196): n is a, c, g, or t
gccggccgggtcgggggcacggcgacacctcagccctcaggtagccccgtagccgcctagcagggccgtgctcgagaaaattaggagaccaacagcacgaagggggaaaaaaggagagcagaaatccccaatccctcctcacttcgacccttgctcggaatctccccgcagcgtccggctgaatccattcgattcactcatggtaggcttcgtcttcttctgctgattcgctggatcgtctccaccgacgcggctgcgcccacacctgccgtcacagccatggagccgcgcatcggcaacaggttccgcgtcggccgcaagctggggagcggctcctttggggagatctacctcggcaccaacgtgcagaccaacgaggaggtcgcaattaaactggaaaatgttaagacgaagcatcctcaattgctttatgagtcaaaattatacagaatacttcaaggaggaactgggattccaaatgttaagtggtttggcgttgagggtgattacaatgttttggttatggacttactgggaccgagtcttgaagatctttttagcttttgcaacaggaagttgtccctcaaaactgttttgatgcttgctgatcaaatgatcaatcgagttgagttttttcattccaagtcattcttgcatagagatatcaagcctgacaattttctcatgggtctcgggaaaagagcaaaccaggtttatgttatcgattttggacttgcaaagaagtacagagatacatcaacacaccagcacattccatacagagagaacaagaacttgactggaacagcaagatatgcaagtgtaaatacccaccttggaattgaacaaagccggagggatgacatggaatctcttggatatgtactgatgtacttcttgcgaggaagccttccatggcagggcctgaaagctgggaacaaaaaacaaaagtatgaaaagatcagcgaaaggaaaattgctacttcaactgaggctctctgccgtggatatcctaccgaatttgcttcttacttccattactgtcgctcactgcgtttcgaagatgcaccggactatcagtacctgaagagattgttcagagacctttttattcgggaaggttttcagtttgattatgtttttgactggaccattctaaagtaccaacaggcacagatgaccactgctccacctcgtgcaattgctccagcagtaggacaaagctctgggatggctcctgtggcaaacaacaatagacattcaggcactgaagagggaaggagaagcgggtggtctgacatggacccaatgcgacgccaggctccaccaccagttataaatgcaggcagcctagccaagcagaagtcgcctgttcggcctgagacatcaacatcgaaagatgctgtgttctccagttcgacttttttgggacgttcaagcggatcgtcaaggcggcctgctgtatctagtagccgagagctaagcactgaagcggagcaaacacgtagccgcacaactgacgcgagcccaggggcattccagaggtctggagctccacggtggagcccgcagatgcctgattcctcggacggcaggcgttcgtcttccagcaggcgccactcatctaaccccaagaactacgagtctaccattaggggcatgcagggcctaaactttgatggcgatgacagggtgcactattagcatctcatctgtctgggagggtgcatcgcctcccctccccatagatggatgtaccaaggacggccagataataaaaggtttgggtgagtgagcccgagcagtccgggtgacgtctcgtaggaactgtgtatgctgcttagcctctgttgttgtacaggcttgtcatttgtttggtctgcgcttaccggtagggcgcgccttgtccggtgaacgatgatggtgtattatgagagggatttcttaaggggttcacgtttggtgtgcttgggttgctttgatagaaacatttgggagaggtttatcgcgcctgctctgctctctcatgtaactccagattgctgagctggcacctgctctgctctctcatgtaatgtaactccagattcctgagctgctatgttttttttttaaaaaaaaaaaaaaaaaaaaaaaactaaaaacaaaagaaaaaacatattacaaaaaaaaaaaaaaaactcgagggagaggggncccgggtaccca

SEQ ID NO: 5438 - DNA, 3271 bp, Zea mays
cattgggtacctcgaggccggccgggatagatagggggcctcccgcgggccgggcgggaggaagccaagtcgcctgacttgcgtcttcttgcttcctcctgtgccgtgtttcatttctttgacacaacgacgtccgggcagccgcctcctgtcgccagttcgccactctctggttgctgcacgcctctagtcggcggggccaagaggtggaaaagggcaggatgaagtccggcgagcggccgaagcagatgcggggcgtccggcaggaatctcggcggttccggcttctggtcatcgtcgccggcttcttcctcgtctccctgaccttcgtcgtcatctccaagcccgattccatcctgtccagcctgaacggcaagctgccggtggaccaggcgccgacgtccatcctgatccagcagaaggttaactcgccccccgccaccgcacttgagacctccaccgacgcactgcgtggagaccctagagtggtcgatgacgaagccgatccaagaccacaggggttcaagggcgaggaggaagagagccgggtactgagcgagccggacgcgaccagcgggatgacggagctgacccccgacaaggacggcagcggccgtaaatccaacgaggaggtgctaggcggcggaggtgacggcgaggggaaaagtaaggaggaccgcggccacgggccggagaagcataaagtgacgctcccaaccgtttccaactacactattcatgacaccgaggacacccaaaatgccaagcaagacgatacaagtaatgaccagcaggggagcaagcccctgtgcgacttctcaaatttcagagcaaacgtgtgcgagatgcgtggtgacgttagagttcacccaaatgctgcatcaatcatgttcatggagcctgggcattcgcagagagatgagctgtggaaaatcaagccgtaccctcggaaaggggacgagttctgccttagccatatcacggagctgacggtgaaatcaagcaaagtggcccccgagtgcagcaagtaccatgacgtgcctgctgtgatcttttccctgacaggctacactggaaatctgttccacgacttcactgacgtgatggtccctcttttcacgacagcaagcgagttcaacggagaagtccagttccttataacggacatggcgctctggtggacaatcaagtaccataccgttcttgagaaactgtccaagtaccctgtgatcgatttcagcaaggacggcgaggtgcactgcttcaagcatgtcatcgtcggcctgcatgcctacatggagttcacgatagactcgtccaaggctccgcacaactactcgatggttgactttaacagattcatgcgcggcgcttactcgctgggcagggacagtgtcaccgtgctgggagagtaccctaaggtgaagcctaggctgctcatcatcaagaggcaccgcacaaggatgttcctcaacctggacgagatcattgcaatggctgaggagctcggctttgaggtggtcatcgacgaggccaacgtgagctctgatatctccaagttcgcggcgctggtgaacacggtggacgttatgatgggcgtccatggagctgggctcacaaactgcgtgttcttgccgcagaacgccacgctgatccagattgtgccgtggggagggttggaatgggtgtcccgcaccgacttcggcaaccccgcggagctgatggggctgcactacaagcagtacagcatcggcgtgcacgagagcagcctcacggagcagtacccgagcgaccatgagatcttcaagaaccccatttctttccacaagaaagggtttgacttcatcaggcagaccttcatggacaagcagaacgtgaagctggactgcaagaggttcaggcctattctgttggaggcactggacaacctcaacgcgtaagaccgtaaaagcttgtgcttgtgctcaattggtactgggcatggcaataaagattccttcctgtatacaattccttcttttttttttacaattcgttccttttagtaaaatctattgttcgttctgtccctccctgagaaggttcgcattgtggaaaatttaggagaaattggcttataaaagttgttgtatacacactgtataaattgctgccactgcatagctttcgttctaatcaatcatacatagctcccgttccaggaaaaaaaatagtataaattctgccggcgatccactcttgttgccaggtggcagccgcagtgccatgtgcgacatgtcttctttcatcctgcaacactacagtattttgggctggtaccagcaaagcgatgtgctgaggcgcatgcagtttattagttaactaccctggctcccacatggtcagcatgtaagtacaccaggtctatgataacaataagatttttaggaaacatgtgattatatatgctttaagcatgtgatggtacaggggacaagctagttcaactaccaaactttggcatccccctcacggcaaatcgcgacttcttttagttagacacggccggtctatgtggggagtgtggtccaaccacgaacgaagtctacaagcttgtgatatgcctctcgagagtcatattcacaaattttacacattattggtcctcgactccaaaccgtgctgtcttttttctagggctcttttgaaggattattttatgaatcctatattttttctaaattttttgaactatttttttttcaaattcatgtattatttatgtgaaattcccgtgttcaaaggaagctcttagaaaggatggccctaatatagcactgatgtgacattgattctgctgccatatgagtacgatgacgttaatatggtgcgacagctcaataatatattgagattatattggttctgccatgtggatataaaaataaaaataaaatcattggacgcaagtgctaattgtggatttgacaccaatcccagattatcttggatctagggatgtgaatgatatgagcattattcgttggtattcaaattcgattcatctaagtgatacatattttagtccaggttactcactatctgatccgtatctgatttatattcgtatcggtatactcaaagtcagatatttaagatattgatatgcatttaaattttatccagcacaactcaacgatccaaatttaaagaaaaaaaactgaaaaaattatagtcgaagcaatatcagtctatattgatacaattacaactctaagggctagtttgggag

SEQ ID NO: 5439 - DNA, 1863 bp, Zea mays
aaaagcaaaaagctacaccaggtctacagcgccgggagcccgggagtccgggatccagccacggccacggggggcgctctcgagagaaagatccagccccaaaggcccaaacccgaaacccctctcttcttcctccttccattggggtcgcgtccaacaagaggctggccagccatcccgcgcgagccacttcctctctcctccccatcggatccagcgccacgcggatccgcaaggcaatccatggcctctacccaggcggaagcggaggcgggggcaccggccccgcccgaggcggcggaggcgaaggagaagggcaagcagggcggggtgctggggagggtgtggcgggcgctcttcggtggccgcgaggacttcgagaagcggctgcagtacctgtccaaggaggaggcagccgtgcacgcgcggatgcgccggcggacgcagttctcgcgccgcgccgtgcggaacctcatcgtactctccgtcctcgccgaggtgttagctgttgtttatgccatcatgacgacaagaaatgaggatctaacttggcaaatgagggcaatacgagtgctacctatgttcattcttcctgctgtatcctctgtcatatattcaacagttgttaacttcacaaggatgtttgagcagaaagaccagaagacccttgaaaaattgagggctgagaggaaagccaagattgatgagcttaaagagagaacaaattattatctaacacagcagcttattcagaaatatgatcttgatccagccgcaaaggctgcagcagcttcagttttggcatctaagcttggggaggagactggcttaaaagttcatgttggagaagaaccaaagctggatgctgcagtggccagaagcaatgatgttgagatagtaccttcagatggtttgagaaacaggaagcaacccaatgcaagaggaagcaggactgggagccccacttctcataccccagcacagggaactgaaactaatctacctcctgctagtgctgtcctggaaactgcaccagctccagtggtggtagagcatcatcaagggtcaggggctagtgatggtggtggatggattgcaaagattgctgccttacttgtgggggaggacccatcacagtcgtatgctttgatatgtgggagctgccatatgcataacggcttgtcccgaaaggaagattacccacatgttacttactactgcccacattgtcatgcattaaacacatcaaaccagtccatggggcaatactcaggctccaactcaggccggtcgacccctgttgttctggctgatggattatctacttccagctcagtacaagagactgaattgagtaacctgacgacattgcaggagctacccgaggaaggaaagacagacaagcaacaagtggaggcaagttgatggttcttatgacttgtattgttgatgtgtgtggaactagtttatctttagacttatatcgtcatgtgttcaactggtggagccacagatttagcactgttgtaaattggaaatagtgagtgatatgatcgtcggaagcatagcacgcaaaaacaagaaatgggacatggtgtacatccttgagtggatgattttttgttgtcatatagagcgcgaagtcttcttcctgcgagacaaaaagctatatgacgttcagacaagatggtggtgcaggatataatataagatcattgcttgttcagagaaaaaaaaaaaatagaattttttgcgtttgtcttgaccttcggtcttttctttgttgtttgttacattaccaccttacagcatttcgtacacagtttccttatgatgttgaaaccgtacttttcatttggcgtt

SEQ ID NO: 5440 - DNA, 1921 bp, Zea mays
ggtaccctcgggccggccggcgcgtgggtgcccccagaaattgcgcccggccgccccccattcaccttcaaaaaaggagccaggcttcccatcaacgagggtgtcggccatctgagcagctcccctgcccctcgcagcggctactctacaggtctagcgactctttcgccatccatagagggaggaggcgcggcggagatggtgggcggtggcggcggcgggccgctgcggcgggtgggcaagtacgaggtgggacgcaccatcggggaaggcaccttcgccaaggtcaagttcgcgcagaacaccgagaccggggaaagcgtcgccatgaaggtgctcgaccgctcctccatcctcaagaacaagatggccgaacagattaagagagaaatatccataatgaagcttgtcaggcatcccaatgtcgttaggctacacgaggttttggcaagccggaagaagatatttataattctggagttcatcactggcggcgagctattcgataaaattattcgtcatgggagactcagtgaagcagatgcccgcagatactttcagcagcttattgatggtgttgatttttgtcacaagaaaggagtctaccatcgagacttaaagcctgaaaatctcctccttgattcccaaggcaatcttaaaatttcagactttggactgagtgcatggcctgctcagggatctttccttctacgtacaacctgtgggactccgaactatgttgccccagaggttctcagtcataagggatataatggcgcacttgctgatacatggtcatgtggagtaattttatatgtattgttagcaggttatcttccatttgatgaagtggacctgactaccctttatggaaagattgagagtgcagaatattcattcccagcctggttttcaggtggtgcaaaatcactgattcgtagaattcttgacccaaatccagagacacgaatcaggatagaagagatcagaagcgatgaatggtttcagaaaaattatgaacctatcaaagaaatagaaaatgaggaagtcaatctcgatgatgtcaatgcagcttttgatgatcctgaggacgataatgaggatgctttcgaagatgaaacaggtcctctaacacttaatgcattcgacctaatcattctttcgcaaggattgaatcttgcagcgctctttgaccgcagacaggactgtgacaagcttcaaaatagattcttatcacgcaatccagcaaaggttatcttgtcaagcatggaggttgttgcgcaatcaatgggatttaagacacacattcgcaattataagatgagggtggaaggtctaaatgccgacaagactagtcatctctcagttatggttgaagttttcgaagttgctccatcaatcttcatggtagaactacaaagagcagcaggagatacttcagagtataacacgttcgtaaataactactgcggcaaattagatgatatcatctggaaatttccaactgagaagggaaaatcaaggataccccggttatcaaagtctcattcataatctagtgctgtgtgttatcaattactatggacttaagtggatatatttgcagagtgtatcgcaattggattatgatattctaagtgtagctcttcgagtagtatatgtttgtatattcagagtccccatgtacaaagaggccgttttaattgaggtttccgtacctcgattccctgtgcaaagttttcatcgatgttttagactgcacatctgtatattttgtcgagagcatcagtttcttagacaccacctatgtatcatgtgtttgttgccaactagtgtcatttttgtaagatctaacttgtgatatacttggattgagtggtatggttgaaaagagtgtgaaagtccattaaaaatgttagtg

SEQ ID NO: 5441 - DNA, 1723 bp, Zea mays
aaaccaaaccccgtaacccccccccgtcgccccaaaaacgcgacgaatcgcgcagcgcggcagggggaatcgctgcgatttcttgtggcccggcggctccagccccacggctgccgagcggataacgaacgactggcggcggctcgcgtcggccttcctcctctccttctcctctctcctcgcatcgcagtcgcagcaggcaacaaaccaaatcgcttaccgcccccgaagcgtctcggttcgcatagcagagctgctcttgcaacaagccaaacaacccagtggctgctagccgagacaggggatagattgagagagaggcgcgcagatggcgacgccgtcgtcgtcgctttgctccagcttcgcctccctgcggaccgcctccatcggccacccccgtggcatcgcctcctccacgcccaggaaggcattccatgtgagggcatcagctcgggttgacaagttctcaaagagtgacatcatcgtgtccccttcgattctgtctgcaaactttgcgaagcttggtgatcaggtaaaagctgtggaggtggcaggatgcgactggattcatgtcgatgtcatggatgggcgctttgtgccaaacatcacaattggacccttggttgttgatgctctgcgtccagtgactgatcttccgttggatgtacatctgatgattgtggaacctgagcagcgagtccccgattttatcaaggcaggtgctgatattgttagtgtccactgtgaacagacatcgaccatccatttgcaccgaacagtcaatcagattaaaagtctaggagcaaaggcaggagttgttttgaatccagcgactccactcactgcaattgattacgttcttgatgttgttgacctggtgctgattatgtctgtgaatcctgggtttggtggccagagctttatcgagagtcaagtaaagaaaattgcagaactgagaaggttatgtgcagagaagggagtgaacccctggattgaggttgatggtggtgttggtccgaaaaatgcctacaaggttattgaagctggcgcaaatgccattgtcgcaggttctgcagtttttggggctccagactacgctgaagctatcaaaggaataaagaccagccaaagacctctagctgtagccgcataaggagctggacgtgtaatcatttactctgtgcaagtttaccagtgatgcgatctgtatagatgtgtgtcttgtccagccatacgtataccggagatgaaaggagacggaggcagtgaagaaatatccttttttttcttctcatttttcacgaggatgccgtgcactgctcccagaatgctgtgtccaatttacaaacgcacaggtggcacatgaactagcagagtagctttctcttgaaaggaaactgtatttggggtcgatgaaccctctggtgttattcttcagactggtaaacgatgtaacatgtttgataatcaataaagtgcgtcgtatggctttcctaaaaaaaaaaaaaaaaaaaaaacgagagcgcgctgtttgtacatcggcatctgactgagtctgaagcccttgtacatgattggaatttaccttaaaactgtctggaactttgcacattttttttttgaaaaatggcaggagctctgcctttcattaaagcgggaaagagggtataaaaaaacagacactcatcaggagtacacctcctgtggaacgagatcctctgca

SEQ ID NO: 5442 - DNA, 3567 bp, Zea mays
cggacgcgtggcgagacgcgtggggccacacccaacaaaaggtaatccgccgcgtcgccgcccgccgccgcccgcagatccatcccctcccggcctccctagcctttcccctcgagcacgtcagcgccctcgccctgctctgtcggccggccaagctcctcaccggcgccatgaacccgtatgatctccgcttcgctgacccctcatcctaccacgacaggcgcagcgacttgaccgtggctcctacgttcgctccgccggctcccgtggctgcggcgaacctgaacccttacgccgccgcctacccgctgcctgtgcccgttcccgtgcccgcggcccccgcgggcggcgactaccagcgctacgggcagggaggcagaggccgtggtggcggtggcagaggcggtggaggagggtacggaggtggcggcagaggaggaggtcgcgggagggacgggcttgactcgctcgccctccctaagccggactttcggagcctgataccgttcgagaaaaacttctacgtggagtgtccctccgtccaggcaatgtcggaggcggatgtggcgcagtaccgccgcctccgggatatcaccatcgagggccgggatgtgcccaagccggttagatacttccaggaagccaacttcccagattactgcatgcaagctattgccaaatctggatttgtggagccaacacctattcaatctcaaggttggcctatggctttgaagggtagggacctgattggtatcgctcaaacaggctcagggaaaacattatcttatctgttacctgggttggttcatgttggtgcccagcctcggctagaacaaggcgatggcccaattgtattaattctcgctcccacgagagaactggctgttcaaatacaggaagaatctacaaaatttggatcatattcaagaactagaagcacatgtgtctatggtggtgcacctaagggtccacaaatacgggaccttagaagaggagttgaaattgtcattgcaactcctggccggttgattgatatgctggaagctggtcacacaaacctacgtagagtgacataccttgtgttggatgaggcggaccggatgctagatatggggtttgagccccaaattcggaaaatagtagcacagatccgcccagacaggcaaaccttgtactggagtgccacatggcctagagaagttgaagccttagcaagacagtttctacaaaatccttacaaggtaatcataggctcacctgaacttaaagctaatcattccatacaacaaattgttgaagttatttcagatcatgagaagtatccaagactcagtaagctcttgtctgatctaatggatgggagccgtatcttgatattcttccaaacaaaaaaggattgcgataagatcacccggcagcttagaatggatgggtggccagcattatctatacatggtgataaagctcaagctgaacgggactatgttcttgcagagtttaagagcggcaagagccccataatggctgccacagatgtggcagcacgtggtcttggtatgatgatttatttgaatattaggattaggtagtagttccaagtgctcaagggtgataagtcggagggttgttgagctgcgattggttgagtgaactgaacttgtggattggtggtgtataccaaggtgccatcatgtcaaaggtagataatttccccccgtggtttacctcatttgagcgtgagcattggcagtgttacacaggcagttcaactttgagctatcatggtaatgttccctttccgaataagccttttagggagcctacatttggataaaatggaaatcctcaaaaagtagcatgcaaccgaatatgcatttcacactatagttgatttcttagcttgatttgaattccttgatccctgcatatctgaccattttggaacatttaggtattgtgttgctgccctcttcattcattctttgtccttgtaattgaattcttttcaatccaatagtctgcttttcttgcaagtatttttggcttacctttctacattttctttgtaaatccatgtttaatttgtttagaattaattggagcaataattcttttcagagatgtattgcaaaattttaggcataaaacatttgtatacaaatgacaatatcaatttcaaatatatttgtttgcacaaatgcacattcttcatgagtagcatgtccatggatctcctttgctttcccctagttttacatgaacctttagaaagtcgttctgctttctcaatcaagctcctcatcatcggtatcactgccaagtgcgaactggtcaaaaggatggttgtaatcagcattcttttcagttgattcacgatagtgacctctgatgcagcaccttacacattacagcctacgttggactggcatgtcctacagaattttgtttgggttatggatattgatgctgttacattattggataagtggttacccaggcatgccagttgcagtcttccaacattttttgataaggctgagaggttaatcaccatcaattccacatccagcagtgattgatgcctggttcagtttttcagctccttcgacttgtgttttagaattcaaaagtgcagcactgtggactttttggtgcttgtctagaccatgtaccttctatggggatcgacaatgttgatgttccagcgtggtccagcatggtattcaggacaacacatcaattttgattaagtactgataatatttgttgattttgcagatgtgaaggacataaagtgtgtgataaattatgattttccaacaactcttgaagattatattcacaggataggtcgaactggccgtgctggtgctagcggaactgcatttacttttttcacacacgcaaatgcaaagttctcaaggaatctagtgaagattctgcgagaagctggccaagttgtgaatcctgccttagaatccatgtccaggtcttcgaactcaacgggaggaggcaattttcggtcgagaggcagaggtgggtttggtaaccggggccatatgtctggatcaaatacctttcctttaggaggaagaaggccatattgatgtgtgcaaaagaactgtgggagtatgggactatttgtatactactcggcattaagtgcattctttgggaaatttctgagaaatttcccctactaccaggattgataacaccatcgattttcgctacagtacctggagcttcttatatgaaagaacaacacatcaactatctagcaacagcatatgcattccattcagatatttcttttggaaggaccctgtcttgttttagtggagtccctgtgatcgtttaaagtcgtctgtatacttgtactgaacttcttgtggtgttactgttaggatttatggttgctctctattggtgtgcggtgttactgaacaaatttagttaagaagttaggcatttccatatttaatctgattctgaaataaactagcaaatttatgatgtacactttataatagtaaaaaatatatatatgcaaactctatatgc

SEQ ID NO: 5443 - DNA, 1710 bp, Zea mays
ccccgcccgctccccgccctcgtcacctacaggcccaagtgggaaggaggcgaatacgaaggcgatgacgaatcacggtttgaggctctgctattggcaatggagctgggagctgaatatgtggatgtcgagcttaaggtggctgacaaatttatgaaacttatttctgggaggcctcctgccggcgggtaacttatagtttcatcccacaactatgagaccactccatcgtccgaggaacttgcaaatttggtggctcagattcaagcaacgggggctgatatcgtgaaaatagctacaaccgctactgaaattgttgatgtggcaaaaatgtttcaaatacttgttcactgccaggaaaagcaggtgccaatcattgggctggtgatgaacgacagaggttttatttctcgggttctttgcccaaaatatggtggattccttacttttgggtcactcaagaaaggaaaagagtctgcacctgcacagccaactgctgcagacttgataaatctgtacaatattaggcagatagggccagacactaaggtctttggtataattggtaaaccagttggccatagcaaaagcccaattttgcataatgaagctttcagatcagtgggtttcaacgctgtgtatgtgccatttttggtggatgacttggctaaatttcttgatacatactcttcaccagactttgctggcttcagttgcacaattccacacaaagaagctgctgttaggtgctgtgacgaggtcgatcccattgccagggacattggagctgttaacacaattgttagaagacctgatggaaagcttgttggctataatactgactatgttggtgctatatctgctattgaggatggaataaaagcatcagaatcagaaccaacagatccagacaaatcaccactggctggaaggctttttgttgttataggggctggtggtgcgggaaaagcactagcatatggggcaaaagagaaaggagcaagagttgtaattgcaaaccgtacctttgcacgagcacaagaacttgccaacttaattggtgggcctgcattgactcttgcggatttggaaaactaccatccagaggaagggatgattcttgcaaatacaacagccattggaatgcatccaaatgtgaatgaaactcctctatctaagcaagcactcagatcttatgctgttgtgtttgatgcggtctacacaccaaaagagaccagacttctccgagaagctgcagaatgtggagccacagttgttagtggtctggagatgtttatacgccaagctatgggccagtttgagcatttcacgggcatgccagctccagatagcttgatgcgtgatattgttctgacaaagacatagtgagtggatgattacaaattccgagcaattgcaagttcattggacaatcctaacaccatgaagcctcgtctgtgagagattcatccatgcccacaaacttccttgtttttcctttttagattcggattcagtgatcagtttgcctctcagccattgtaaattaatttgatgttccgagctgaaacattttggtgtgccttatttgtatcagcatgaacagcagtcatcgtgggtttgaatcagtctcttagcatttgcgttccctaaaaaaaaaaaaaaaaaaaaaaaaaaaaagaaaaaaagatacaaaaaaaaaaaaagtac

SEQ ID NO: 5444 - DNA, 2752 bp, Zea mays
gacggatggcttcatccgattggtgtggtctatttgtctcccagtcccactccgtccactcgagctctccaccagctttccccttctctccggtccgggaatcggaagctcagggcagaaggtaagctaccagaccatgtcgtagcccctagtttctactgcttgattattacttttcgcttttcttgggagtacaattttatttactcgccgttttggggctgttcatgtttctgttagtgtgtttggtgccttgattttttcagataattggtgcctttcttgataagttgatatacaaccgtggatccttggaacttcgatttagttagtgactccgtaggtatcagataaccaaaaaaagaggaatcacgtgaactaccggttatatttcccctggatttcgacaaagctttttaggaaatttcgtactttttttcatggagaaatttcgaagacaccaatgaagttctcgcataaaataataaaaaaaccctaagcatgctcgattttcatttttttttttgccatgaacaactgctagtcaagcacaaaacaaggatttcctaattctccacactcgacaaccattattttcacagcttcaagaactctcaacttcccctcaccccaacccaaaagaagtgaatacaaccataaccttcacagcttcaagaacttttcaacttcaaggaaatttctaaacagtaattcttttttaagctggtgaggtgtcccggccctcctgtttcctgaaaaaaaagcacgactgaactagatgttattaggtccgcacatgaattgcatacgaaatgttttcctgactggggctaaatcgctagttaagccatggggcagacgcatcttttgttgctcgcttgtttctgggtcctgtcaacatgctccttgctacttgatgcttcctccgatggactgttaagaatcaacctgaacaagaagagactggacaaggaagctttgactgctgcgaaattggcgaagaaggagagccaccttcgaaggtctgtgggtgctgaccagtatctcagtgcctcaactgatgacatagtccctttggacaactacctggacacccagtactttggacagatcagcatcggcacgccaccacagaacttcacagtgatattcgacactggaagctccaacttgtgggttccctcatccaagtgctacttttcgatagcgtgctacttacaccacagatacaagtcaaccaagtcgaagacttacacaaagaatggagaatcttgtacgataacatatggttctgggcaaatcgctggcttcttcagtgaggacaatgtgttggttggcaaccttgttgtgcaaaatcagaaatttattgagacaactcgagaaaccagccctactttcatcattgggaagtttgatggaattcttggtctcggatttcctgaaatttctgtaggaggagcccctccaatttggcagagcatgaaacagcagaaactggtcgcaaaggatgtcttctctttctggcttaatcgtgaccctgatgcatctgctggaggcgagcttgtctttggtggtgttgacccaaaacactacaaaggggaccatacatatgttcccgttacacgcaaaggctactggcagtttgacatgggagatcttattattggtggccactcaactggtttctgtgctggtggctgtgctgctattgtggactcagggacttcattgcttgctggtccaactaccatagtggctcaagtcaatcatgcaattggggctgagggaatcatcagtacagaatgcaaagaagtggtgagcgagtatggagagatgatccttgagttgctcatatcgcagacaagcccacagaaagtgtgcactcagattggtctctgtgtatttgatggtgcccattctgtcagcaatccaattgaatctgttgttgagaaacagaagcgtggttctgatcttttctgtactgcttgtgagatggctgttgtctggatacagaatcagctccgtgaaaacaagacaaaagaactcattttgaattatgctaatcagctctgtgagcgtctccctagccccaatggcgagtcaactgttgattgccatcagatctcaaagatgccaaatcttgcattcaccatagcaaacaagactttcaccttaacaccagagcagtacatagtgaagctggagcaagcaggacaaactatctgcatcagtgggtttatggcatttgacgtaccgcctcctcgtggtcctctctggatacttggtgatgtttttatgggtgcctaccacactgtttttgacttcggcgagaacaggattggatttgccaaatctgcatgaggactggagttctgcgctttagtagcatgtccagtttgttatcccggtattgtacatatatatgttgccaactggtgtaatccgcagtgtttaatagtatatattcatgcagaaatctagaagattgtggcatgatatgtgtttgcaaatggagctatgctatgtatggagctccaggacctagagttttatgtaaagggagacgatgaggattagggcttttaacctattctcatcacgttattgtcctgattactaaaaaaaagtataggttgctgagcttgtttgggagcaagacaattggaggggatgagtggactaaaattcccttcctatcaaaattgaatatgaagagtattttagctctctcaatcttcttcaattctcttgc

SEQ ID NO: 5445 - DNA, 1549 bp, Zea mays
  misc_feature (20)..(20): n is a, c, g, or t
  misc_feature (34)..(34): n is a, c, g, or t
ggctaaaagaattatatatntgggacagaggggntacgttggaagcatctttatagccagcagtcggctgtacttgctcagtcaagaaaacgcgacataggcctccctcaccaacactatctgctataaataaaaggatcccgccagtacattccctctacgtggtcattgaaccaaatcgcagttcctatgtcgacacatcactgtcaatttccacggaagttccagctgcaatccgatgcatagattacacagaatgcatatacttccaatagtaggctatgccatctccatatcactgtgactcatgagtacagtgtaaacatgaaggcaacgttctgttcgtaaggatttcagaacattttccgagtaactcatttatatgatccgttattcgatcttcagatatggtcctgttattcgatcttcagacttactaaagcaaagccatgtggagaagaacttcgccctctacttggccttcttggaagcctcgtacaagtagccagcgataactacggctgcagcaactgctaccccaaaggcactctgtgcaagcacggcggcggttggaagatctgatttggatggtgctgtgctgcgaggcgtgaagccaagctcagagagtttcttgtgtgattcagcataatctttgaagaacgcatcttcatcctttgcatagagctccacatagcgcctaaattcaggatctgataacagtgccttgtcagttgggagctttaaaagtccctcagattcctcattcaacagctcaagaaagtatgagttatcaaacttaagaggctcctttgtccaggcaccatcgaatccagacctctcagggtgagcccttcccagagtatgtccccctgatagagctacaatatctttgtccgataagcccatccgataaaagatgtccctcagatgtggtgcacctttcttagcatctggcagacgcccttcacgggggcacaccgacgaatcacgtctgccaggaataaattcaacagttggccccccagtcacttcgactgcaaccactccagcaagctgatacaggtctgcatatgttatctttggattctttgctttgataggctcaaggagatcgatagcaatctttaaaccagcatttgaaccatgagtgtactcttcttcatatctaatcgaaccatttgcaccaccagtttttgtcttcaggtcataagttccagcatcatgccatgcgaggcggagcatgatcggggcgcatcccttgttggagatgagggcgcggaggtggcggcgcgccctgtcgacctggcgcaggtattcggcgtcgaccatgggagccgccatcgccggcgcctcagccgcggattcctggagatcggagagttggagtggaaccgtgggcggagcggaggcgtgtgggtggcgagtgctgactgactgctgagcagtgggggatgggaagggaggaaacgacaactgacgagccgaacaagataacgcaagcgagcgattctattggcctccagttgccggcgcctggcaacccccggcc

SEQ ID NO: 5446 - DNA, 3608 bp, Zea mays
ctgtcactctgcaactggttgcgtcacacaattcttcgataacagtttcaatcatcctatcatttactttagagcataaccaacagtgatattagacctttaggatttgaaatctttggaagcaagagtaccagagaggattgagggagctagaacccctcactattcaataacaggcccttaaattggtatcacttggatttcttaagacagcatcacgcctaccctgatgtatacatgataacaaattaatttagtctaggaactagagtacaaggttacagaggctatctggcaatgccctctcctacagacaacgcatattttgcttcaggtcaaaacccgccgctagcatttgtcggctaacatatggtactattgctgctaaagtgctaattacagatacagtgagttggagaacatgataccccgacgcaaactctcacttgcattcttgaacttcttctcaaggttaacctcccctacggcttcagcagcagctctcaactgattcagaaattcatccagccttctagcaagtcttatgacacttccttcaaatatgtcggtcatttccatcacctccgcaaaggtggctccccttgaccaacagtatatgacatccataaggtagggtctgcaggttgattcaacatattcctccacatttacttccagtttgcattctcgttgtacctcagctatttttcttgcagcctcctgaagctgcatcatcggcctagaaagttcatttcttaggcgtatctgctcacttgatttatcacaaggtacaaagcagctagcaagggaagcaacttgatgatggtcaagatcattaaatgtaccattgaacataagttcagtgataagcagttcatcccctgtgtctattagacaggcagcacgtcctttcaactggagaacaccgtcagcatcaatatgccccagcatcttcagaacacgggaccggttcctaagttcatctctaaatttttgtagctgtgaatcccgcatctttgacttgagttgctgaatttcagtattcagatctgcttttttttggtaccatgatagttcctgttcactttgaccggacttatgaagtcggtgagagcattgtttctgctcaaggtcttcaagtttatgtaccaagtcaactagttcaggttcttgaatacccatgtcattgattggatgtagtttcggaagaccttgggggtagcgctttcctagttcttgcactgcagaaagtatattctgtcttgcttcaggtggtcgtagatcaggaggaatgttgattctaacactgcttagaccagatactaaaggcaatggtacaggcaccacatgcatttcacccttttcccctgggcgaggagggcatggctttgaacgtgatccattctcgctggaattagaggagcagtgaagcaaggtgtcgactgtatagttgttgctgcgcgatgcacttaatgcaggagggagagtcccagatgctggaggtttcttcactacatttacaaccacaccccatccccagtctgttgaaccatccctcactctaaccagccttccaggaaccaaatacaacaaagccctctctggtctaatcatctcagacatgattttcttctccagttcagatatatcaagccccaatttgtgatattcagcaagatcagtctcgccagaagaatcaagcaaggtagcttcattctccaaccgtgtaatcttttgagctatttctggcaatgccttctcatactgaaattcatggaatgaatgcctaatcacatgctcagcggtaaattggccctccacacggctcattaagttcagaatagtgtagtagctcagacggaaagtactgactagaggtgctggtttgcctaacaccatgtccttgataacactcatttccatcttctcatctatcattataacacagataccacgttcatccttgccacgccggccagctcttccactcatctgtatatattctccagaaccaatatagcggttactatcgccatcccattttttgacagacgtgaaaacaaccgttttcgcaggcatattaagacccatggcaaatgtctcggtagcaaagagagctttcacaagaccttcttgaaagagcaattccactagctccttaattattggaagtagtccagaatggtgtactgcaatacctcgtttaaggagtggcaacatcaactctatagcaggtaaacttctgtcttcctccactaaacaaccaatggcattacagaaaacctgctcaatgcattccttttcttcttcagtgctgaagtcaagttttgacatagacatggcatgatgctcacattctcttctactaaagctgaaaattatgactggttgaaacttgcgctccataatcatcttaacaattctgtatatgtcagaattcccagaggcgcttccaccttttgcaattcggccactcgctttaggtccaccacctttccttccatccagttgattatttggcttagcaaaggagtcttgtagcttcgcaaagttatcttctctaaactggccattttcatctactacaaggtaaagaccagaaccacctattggaaacatatagtgctgcaatggtgtgggcctgaagtccgtatacacaacatgacagggctgcttgtgcaggctgcatatccattcagcaaattcggtcgcattcgacatggtagccgaaaggaaaaccatcttgatggcagggggcaagaaaatgatgctctcctcccacacgacccctctctcacgatccttcatgtaatgtatctcatcgaatataacccaggcaacctccttgatcacctcggagcccctgtagagcatcgccctgaggatctctgtcgtcatgaccaggcatgtggcgttcggatggagcgtgacatcgccagtcatcagcccgacatctgtgaactcctgactgagctccctgtacttctggttgctcagggccttgagcggggaggtgtagatgaccctctgcttgtccctgaacgccatggcaatggcgtactccgcaacgacggtcttccccgcggaagtgtgcgcggagacaagcacggactcgttccgctccaggcaagcgatggatacgctctggaaggggtcaagcttgaacgggtactgcttggccatctccccattgaaggccgggctggcaagcgtcccgtgcaccgcctcgtccttaaccgactcgtacccattcgggacggctacctcgtggacgcaagagcgggagatgttcgggcgcttggccgccgggtccgcctgcgactgcgccggcgccggcgcgaggctcggctgctcttccacgctcgagtccggcgccttgcgcttgcagttgctctccgcctcttcccccatcggcccctgctcgacctaaacctggctgtgctcgtcgccggcgaagagcccgaagaagacctgggcagcttgcgttgggcgacagcggctgtcggctgtcgcccagtcgtctccacgagagaggcgagagggagacagcgcgcgcgacgtgggggcggggttggcggcggccggcgtgcaactgtgaatgcaacggg

SEQ ID NO: 5447 - DNA, 1893 bp, Zea mays
gggaccctcgaggccggcccggccgaacacggatggaattggcgcgggcggcgggctggcagttgcgcagcaataactcccgctgcccaccggctcacctgtccttcatccgccccgatccgaccccaaatcaattccaaattcaatccggtctcagtggttggcccgccgctgccagtgccagatcgaatcggactctcggctcgtgtgcagcccaccggcgagacgccgaagctatatttttatgcccatctgatccgatgcgtggtgtggcgtcgtctccgcttttactagatcatcagtagccagctcaggagccgagcctggtcagggtagccaagcccatcccggtcctctcccggcgtcttctccctccgcaccgcggctccggcgatggcgggcgtcggctccgcgctgcgtcggctctacctctccgtctacaactgggtcgtcttcttcggatgggcgcaggtgctgtactacgcggtcctgacgctgcgtttgagcgggcacaaggccgtctacgccgccgtcgagaggccgctgcagttcgcgcagacagccgccatcatggagatcgttcatgggctcgtagggttggtgaggtctccggtctctgcaactcttccacagattggatccaggttgttccttacgtggggtgtcttgtggagttttcctgagacccagtcacaccttcttgttactaccctggtcataagctggtctatcactgagatcatcagatactctttctttggaacgaaggaggcatttggctttgcgccttcctggttattatggcttaggtacagcacctttatgttgttgtatcctactggtatctctagtgaagttggtctgatctacattgccttgccttacatgaaggcatcggagaaatactgtattaggatgcccaacaaatggaacttctcatacgattacttctattcatctgtccttgccctcctgatctatgttccaggaagcccacacatgtaccgttacatgctctcccagaggaagaaggcgctatcaaaggccaaagcggcatgatgatgccaagcaagggaatcggtggactggtttgcgtgatggatgccggaacatgttcaagttttcgacatcccctgtagaatctagtggtcgggggatatatattactagaatggggctcttcatatgaactgccccgtatgcgtaatgtgttgtaccggagtcatcatttcagatatcagctgttgcgtggttaaatcgtagtttgcttccggatcacccatcagttggggggtggattaccatgttgattatataaggcaatgcgttccgcatccttccctcaactggtgctgtgctctcttgtttctagcgtacgatgaatgatggattttatcccgggcctggaacattttgcatgctctagcttcatgttgattattatatagcaaaattagcaatgtatttcttacttatgacactgatttttttttaaaaaaaaaactgccaagggggatccccacctgaaaaaaaaaaaaaaaaaaaaaaaaaaaaaaaaaaaaaaaaaaaaaaaaaaaaaaaaaaaattgggaggatttattatctttctcctttttccccctcccctggaccctttaagcctaaccaggatcagctttgttgctgcggaggcaatccctgtcgcctgctccctttgatccccatgagagtaccacgccacacccttaaggtccagctggcctcccctcccattttttaagaacaatctgcaccatgctgctgctgctgctccatgagcagacggaattcttctatctggttcgcccgatgagaagaaagataaaaaaaagtcctccgaattctgctttctcacccttgctgttcatcgattcc

SEQ ID NO: 5448 - DNA, 2342 bp, Zea mays
atagcgggccttcgcgctcgacctgggcgccggcgaagccaatcgccaagccaagccaagccagaagcggcagcctcgcgcagcggtctggtctctctggtgggtggtgcccctcttcgccggtggccggaaaggggagtggagtgggaccgctcaaggagaggccggcgtccccaagtctcacttccgccgtccgctttccccctgtagggatcgagggaggaaggaaaggaggtgcttcacaatgaaggccctcattcttgtcgggggtttcggaacccgccttcggcctttgactctgagcttcccgaaacccctcgtggattttgcaaacaagcccatgattctgcaccagatcgaagctttgaaagaagttggggtcacagaggtggttttggctatcaactaccgcccagaggtaatgattaatttcttgaaggactttgaggataagcttggcatcacaattacatgctcccaagagactgagcccttaggaaccgctggccctcttgctctagcaagggacaagcttgcggatggatctggccagccattctttgtcctcaacagtgatgtcataagcgaatacccatttgctgaactcatcaaatttcacaagtgtcatggtggtgaggcaacaattatggtcactaaggtggatgaaccatcaaaatacggtgttgtggttatggaggaggcaactggcagggtggaaaggtttgttgagaagccaaaaatatttgtgggtaacaagatcaatgctgggatttacttactgaacccatctgtccttgaccgcattgagctgaggccaacatcaattgagaaagaggtcttccctcaaattgcagctgatcaacagctctatgcaatggtccttccaggtttttggatggatgttggtcagcctagggactacattactggcttgcgtctttatctagactcgattaggaagaaatcagctgccaagctagctactggagcacatgttgttggcaatgtgctggtgcatgagagcgccaagattggagaaggttgtctgattggtcctgatgtcgccattggacctgggtgtgttgtggaggacggcgtgaggctttcccgctgcactgtcatgcgcggcgtgcgtatcaagaagcatgcttgcatctcaaacagcattatcggctggcactcaactgttggtcaatgggcacggatagagaatatgactatcctgggggaggatgttcatgtgtgtgatgaggtgtacagcaatggcggtgttgttctcccacataaagagatcaagtcaagcattctgaagcctgagatcgtcatgtgagctctccagttttagctacagtacattcttaacttctttgacgaagggaggattgcagatccccttttataaacgatattgcttggtatcttcgatctaatgcaaacagcttcatacttggtctcttgttaaactattgacaatgtatcttgttttttgttgaaaagtttagtacttgagtgtcaatcatacgtattcgcttgctaaactattgacaatgtatcttgttctttgttgaaaagtttagtacttgagtgtcaatcatatttcagagtcattgtgatatactgagctcgctgcgttgggccctcgacctgcagaagttcaatacaattggaagaataagttaaaaaaaacgtggtccaaagtaaccttcagcagtaatgtttgtgtgctaaatgctcttccggagaattgtggtgatgcaaaccttgtaccaatgaatatacactgtcaatctgctatcttttccgtggcccctaactcttagagtgtgtttggtttgagttgaggaatcacttcatccaatataaggtggtgtattgtgaatctatttctcaaatttgatgggttgatcttattcttatgttagtactaactaactaggaataagacgtagatcaactcattccattctataaactaaacaaaaaaattaaaattgagaagatagagtagcttatttcttaaaccaaacaccctattagttactagtactttctttaattttaaaaataattttggcaggagcaggctagtggtgagcaactgactaactgagtatagagctaggtgctccggcacttgagtcccgactcctacctgtagaattgtgttttcagtttgaataaaacgttggaatcatttttttaaataaatgctggaaccatggcatttatgcaagggatgctgtacgatgtcgactgtttctatcatcagagaagacttgtctttaaatcattctaatataggctagaaagagtgatggatgtattgggtatgagccagtgaa

SEQ ID NO: 5449 - DNA, 1618 bp, Zea mays
cttaagagcctaagaccattgatattgcatttcaatgctagatcgttgaacttgtatttttatttaccactagaacttcgatgtgaatccgtatgtgttggtcggcccgcctcaacctttcctctccgaagctttgagaacaacagcaggctcaacggtccagagctacaaggattggttccttatgattttggatgttagatgccgatcaacaatgtaccaccttccccagttgaaagggggaaagccaagatagtattatcaatagaaacctagcttcaagaatgtcgtgactatatatatgtatgatattaagacgagatttgataagggtggcatagcaagtcctgatattctgtgtgcattcagaatagctgcttttatgcccttgtgttgatattttgcaaaccaaaacaaactgttctgaaacgagggcacatattgttcatgaataaatttgagcctccaatacatacatttcatgttttctgtacaacaaaatcgcacgataaaagaataggacacttagcaagtcataagcatctcaaggaacatcctactccatctgctatacaaaaacgatcacgatgttcataccagctgaagctggctgggcattgggatcaacacatgattatatagagaaaaaaacattgaaaaaaaaaaaacatctgcagactgttcccttgaaaaaacaaaaatggctccagggaaacgctggcttccaagtaatcgctaaatccccgcaaaattgatcgtcgaccaatcagccccatcgcttggggattgggcctcctcatatattgaccaaaagttgcccctctgtaatatgaactgcaatgattatcctccaaattactttgcagatggttctgtcaatggccttccatataggcggaaaagtaatgaggattttgacatctgaggctctcgctcgagtgccgctaccacatccttcatagaaatactccgcgccacttttgttagcggtgaccttctaacaccaccagatccaagcgcaaaagatttatgactaagaaaacaaactagtgcatgcatggtagatattactctgtattacctaacctagaaattcagtatctaaaataaatttattcatatcgtacattctgtcttgtttatattttgacaagttgtttcattgactaaaggcatgtttgaaagcacccagtttttaaaaaactggtttatgaaagctgagatggttccaaacgtactagaaactggattctcaatttcttaaaaataaaaaaaaactacacttgcctagctaaacccagtttatgaaaactgaggtggttccaaacaccgtaacctagtttttttcgtaaaccagtttctaaaaactggagataaaactggatatttaaaaactaagttgcttctaaacaaggcctgagatagtttggtggtaccctgataaacacaggaatgttattgtcatcttaggttctattgaatttgaaatgaggtcattttaaagaatatttctagtttttactgaattagcgttggtagagtggcacatcactaacattttaaaaatagatacgtgtacacaacatttaaacaaaaatcaagggatgacctaaatagc

SEQ ID NO: 5450 - DNA, 951 bp, Zea mays
cccacgcgtccgcccacgcgtccgcccacgcgtccgcccacgcgtccgcttgcgacctcgtgccaggttcagctggccagatcggtggcatgcagcagccactgcaaccacaagttaaccacatgggagttccacaaagccagccaatgtatagtaaccaaccaatgcgacccggtcaggttgccgccacaacacagatgcagcctggcttcggaaaccagcagttcggttcgctaccaccaacatccatgctgggcatgcaattcggtggcatgcagcctccgcagatgtatggcggatcgcagccagtcatgatgtacccgcaacaaatggcagtggcccagtatggagcaatgccgcggcagcagccgacgtatggtggtcgattggcgggttacatgcagcatcctgctgtggctgccgcacactactacaacaaccaggggatgtatggctaccccggtgcgaacgggctgtcacagagcatgtatggcctctcggtgcaggacaactcgtccatggggatgaggtcgtcttaccagactacgacggcgccaccctccacggggcaacctatgaagccaacgaagcccgaagacaagcttttcggtgacctcctgagcattgccaagacgaagaaagcttcatgagacgagctcgagcaggagcggccttctgatatatcgtctcccctatttttcgtggtttttcgtgctgtttgatcttacacttgtaacattatctgaatgtgtaagctttttgggggtccttttcttttattcccacgtcgtgtgtgatctattgatcccattggattcgttataccgtgtgcgtgtactgatcacgagcgatgggaaactttggccgtaaatgatgattcaataaagggtgtgcagtacgtgattatgaaaaaaaaaaaaaaaaaaccccacgcgcaagcccgccctcccc

SEQ ID NO: 5451 - DNA, 1791 bp, Zea mays
cctgccgggagacagatgtcaaccccgaattttccgtcgccccccctgctcgccgtcgctccttcggcccttcctctctcccatctcggctagggttaggtcgtctcgccaagtcgccatgatgcagcagcccccgccgcagcagccgcagccgggcatggcgccgcctccgcctccgcaggctgctggcgggcagccaccgcagtggggtgggatcccgccgccgatggcgcagcagtacggcgcaccgcctccgcagcagcctccggcgatgtggggccagcctccgccgcaggcgcactacgggcaggcaccaacccctcagcagtactacgccgcgccgccggtgccggtgcaggcgccagccgcccccgctgcggcggacgaggtcaggacgctctggatcggggacctgcaatactggatggacgagaactacgtcttcgggtgcttttcgaacactggggaggttcaaaatgtgaagctcatccgtgacaagaattcagggcagcttcagggttatggttttgttgagtttacaagccgtgcagctgcagaacgagttcttcagacatacaatggacaaatgatgccaaatgttgacttgacatttcggctgaattgggccagtgctggtgaaaagcgcgatgatactcctgaatatactatttttgttggggatttggctgcagatgttacagattacttgttacaagagacattcagggttcattatccctctgtcaagggtgcaaaagttgtgactgataaattgacaatgcgcacaaagggttatggatttgtgaaatttggtgatcctacagagcaagctcgtgcaatgactgaaatgaatggaatgccttgttcttccaggcctatgcgtattggtcctgcagcaagtaggaaaaatacaggaggtgttgttcaagagagagtaccaaattctcaaggagctcagtctgagaatgatcctaacaataccactatatttgttggtgggcttgaccccaatgtcactgaagataccctaaaacaagttttttctccttacggtgaagtcgtccatgttaagatccctgttgggaagagatgtggttttgttcagttcgttaccagaccttctgctgaacaagcgctgctaatgctgcaaggggccttgattggtgcacagaatgttcgactttcatggggtagaagcctgtcgaacaagcaggctcagcctcagcaggaatccaatcaatggggtgcggctgctggtgctggtggctactatgggggctatggacaaggttatgaggcttatggcagtgggtatgcacaaccccaggatcctaacatgtatggttatggcgcttatggcggttatcccaattaccaacagcaaccagctgcacagcagcaacagcaacaacagtgatgcctgtttgctcgggtaggtcattgggttgtcgcgacggaattaattaaatattatttcaggacactctcatattgcattcttgtcaattgaggtggttttgaaaggctcctgattttgatggccccatggcacggtttcatctatttattagtatatgacatatatgcgctgtgaacaagtggcgctctactgtgattgctgtgttgagacatgctttcttagtttctttccatgtttctcggatctgttgtgttacctttattactgtgtatttgcatatctactgtgatgctatatatgcactgtgccgtttgtttcctataaaaaaaaaaaaaaaagagcccccgcccgggaatccggaccgtacggca

SEQ ID NO: 5452 - DNA, 2424 bp, Zea mays
gcacgagaccattacctagaacatcctaatcaaaaaattcgagttcgaggcgacaggcatcgtcgtcccacccagcagtgcagagactctctctccctccctctccccggccacctctcgctcacgagcaccccatcttcccggccagggcctgggtatgggtgctccgctcgcctcctggccatgggcaagcctcggatcatacaagtacctgctgtacgggcctctggtggcgaaggtggcgcacgcgtggagggagacggggagcctgccgctggggtcgtggtgcctccacctcctgctcctcctggcgctccgctcgctcaccttccagctctggttctcctacggcaacatgctcttcttcacccgccgccgccgcgtcgtcaaggacggcgtcgacttccgccagatcgacgccgagtgggactgggataacatggtgatcctgcaaaccctggtcgcggcggtggcgatgggcagcgcggcgttcccggccgtgtcggagctgcgggcgtgggacccgcgcgggtgggccctggccttgctcctgcacgtggccgtctcggagcccgccttctactgggcccacagggcgctgcaccggggcccgctcttcagccagtaccacgccaggcaccactcgtcccccgtcacgcagccgttcacggccgggttcggcacgccgctggaggcgctgctcctgacgctggcgatgggggccccgctggcgggggccttcctggcgggcgctgggtccgtgagcctggtctacggccacgtcctcctcttcgactgcctccggtgcatggggtacagcaacgtggaggtcatctcgcacagggccttcgccgccttcccgccgctcagatacctcgtctacaccgccacgtatttgagcctgcaccacagggagaaggactgcaacttctgcctgttcatgcctctgtacgacgccctcggagggaccatcagctccagatcgtgggggctgcagagagaggtcgaccaaggcatgaacgaccgggtgccggacttcgtgttcctggcgcacgtggtggacgtggtgtcgtcgatgcacgtgccgttcgccttccgctcctgcagctcgctgccgtgggccatgcgcccggtgctgctcccgctctggcccgtcgccttcgccttcatgctcctccagtggttcttctccaagaccttcaccgtcagcttctacttcctccgcggccggctccaccagacgtggagcgtcccgagatatggcttccagtacttcatcccgtcggcgaagaagggcatcaaccgccagatcgagctcgccatcctcagggcagacaagatgggcgtcaaggtcatcagccttgctgcgctgaacaagaacgaggctctcaacggcggcggcacacttttcgtgaacaagcacccgaacctgagggtgagggtggtgcacggcaacaccctgacggctgccgtgatcctcaacgagatccccagcagcgtgagggaggtgttcctcaccggcgccacgtccaagctcggcagggccatcgcgctgtacctctgcaggaagaggatcagggtcctgatgctgacgctttcgacggagaggtttctgaagattcagagggaggcgccgccagagttccagcagtacatcgtgcaggtcaccaagtaccaggcggcgcagggctgtaagacatggatcgtgggcaagtggctgtcgccgcgggagcagcggtgggcgccgccgggcacgcacttccaccagttcgtagtgccgcccatcatcggcttccgccgggactgcacctacggcaagctcgccgccatgaggctccccaaggacgtcgagggtctcggctcctgcgagtacacgatggagcgcggggtggtgcacgcgtgccacgccggcggcgtggtgcactgcctggaagggtgggagcaccacgaggtgggcgccctcgaggtggaccggatcgacgtcgtgtgggaggcggcgctcaagcacgggctcacgccggcgtgagcgggagggcgcccggagcgggagaccgagacggccggcgcgcgcggccccgcccggaaataacgcgtcgtctattcgttgtcgcatggctgttgcgacgggtgggtcggtgtgctaccgtgtactactactaccagctactagctaccatagtccaagactgctgcaagcgcaatgcaacagagttgataggctggttcgcatataccaatactcttatgtacgtaccgaatactgcaatattgcacgaggcatgggcttccgttacttatggccaggcctgcgacctagtataaaaaaaaaaaaaaatctgtactgttcattgggctctaaactggattgaaagtctgggccggaccaactgggcccacccaagcatggtacaaaagcaatagccc

SEQ ID NO: 5453 - DNA, 2457 bp, Zea mays
ttgggtacctcgaggcccgccggcgccttcaccgccacacgctgccacgcgccatatataaccagccgttccctcctctcatgctcccctttccaaatccgtctccgccctcacgcacgcggcccaactagcctaacaaaccctagctagatttagaaaaaaaatttgtccccaatccgaaccgacgaggagctcgccgccgtgagatgtccgagtacgacgagcgctaccagggcaacggcgacatgcccgcagccgaaggcggctatccgcaggccgagtacgccgccgccgccgcgcctgccgccgggggttcgccgcccgcagacagcaagccctccgggttctccgaccacgccgacggccgctcctcccagcaccagcacgagacacaatcacatgacagtggttcctcgaaatctcgagaaagggaccgagaacgcgataagggcaaggatagggagcgtgacagggatcgtggccgagaaaaggggagggaccgagacagggataaggatcgtgaaagaagtgacagagatcgcgatcgccaccacagggaccatcgagagcgcagcgagaaaagggaacaccgtgatcgttctgatgatcgtgaccgtcaccgtgatggtcgtgaccgccaccgtgatgatcgtgattctgagaggagaagagatcgtgacagagatggtcatcgtaggcatcgctcccgctccccttctaagagtcgtgaccgtgaccgcagatctagatctcgttcacgctctcgatcaaagagcaagcgcgtgagtggttttgaccaagcacctccacaacatgcacttcctattgttgctgctggtgctatccctggtcagcttcctggtatcactgctcctattcccggggttggggtgcttccgaacttgtataatttggctgcaggacagttcaacccccttgttattcagccacaagccatgacacaacaggctacccggcatgctcggcgtgtctatgtgggtggacttcctccaacagctaatgagcagaccgttgccatattcttcaatggagttatggctgctattggaggaaacacagctggtccaggtgatgctgttcttaatgtctatataaaccatgacaagaaatttgcttttgtggagatgagatctgtggaggaagcaagcaatgcaatggctttagatggcataatgtttgagggagcaccagtgaaggttagaagaccaacggactataatccttccctagcagctgctcttggcccgagccagccaaatccaaatctcaatcttgctgctgttggcttaacacctggctctgctggaggattagaaggtccagaccggatctttgtaggtggtctaccatattatttcactgaggctcaagtgcgggagttgctcgagtccttcggacctctgcgtggattcgatcttgtgaaggatagagaaactggtaactcgaagggatatgccttctgtgtttaccaggatcttaatgtcaccgacattgcctgtgctgcccttaatggcatcaagatgggggacaagactcttactgttaggagggcaaaccaaggagcttctcagcctaggccagagcaagaaagcatcctgctgcaggcacagcagcaggtgcaaatgcagaaactcgtataccaagtcggaggtgccctgccgacaaaagttgtctgcctgacacaggtagtgacagcagatgaactgagagacgatgaggaatacaatgacattgtggaggacatgagggaagaaggacgcaaatatgtcccacataatgccattgcagagtgttttatagtccgaccctatgcaatattggcaatcgggctttaacccacagaagacactattcttttgagtttgattaatcattatatcattagcctcttgcctatatatctctactcactaacacttggacaggtaacttggtgaaagttgtaattccacgacctgaccccagcgatgctccagttgctggtgttggaaaggtgtttttggaatatgcagatgtcgagggctcgaccaaagcaaagacggggatgcatgggcggaaatttggcgggaaccaggtggtggccgtgttctatcccgaggacaagttcgctgctgagcagtatgactgaaagttgtagaacctgttctagagttgcaacacacaatgtgtgtgttttttttaaaatctttgagggtaccggtttctcttgaatttgaatcttatctagttataagtttggtgcaggaccagtcgataagcgataagtttgtgcaggaccattaggctttgtttgggtaattagtattgatcccaatccaaatctatatatgttaatgccttgttcagttattcttattccatatggattggagtgtatcggaatgagttttgacttgctatagatttaaacaaactcaaaaaaaaaaaaaaaaaaaa

SEQ ID NO: 5454 - DNA, 1505 bp, Zea mays
  misc_feature (1361)..(1361): n is a, c, g, or t
  misc_feature (1383)..(1383): n is a, c, g, or t
  misc_feature (1442)..(1442): n is a, c, g, or t
  misc_feature (1455)..(1455): n is a, c, g, or t
  misc_feature (1467)..(1467): n is a, c, g, or t
  misc_feature (1480)..(1480): n is a, c, g, or t
  misc_feature (1502)..(1502): n is a, c, g, or t
gggcaccgcgaggtaccgcccgggactctccgcaatatggcgcggggttttctagggtttaggggtcaggccgcccggtgttgtgtcgtcaggtagccgcctccccacctcttctgcttgttctccgcggcggcggcttggatcggagcggaggaagaagatggtggcatcgatcagggtgcccaagacccaacgcgccaggcgggagcttctcaagcacgcgcccaagcttgttgagaccagcaagaagacactgatcctccatggtaccaagactagtgctgtgttgaactctgtgctgtcagatatttaccacctaaagcgtgataatgctgtgaaatataccaagaagaatgacaacattaggccttttgaaagtggtggagaatcttctctggaatttttctcccttaaggcagactgtagccttatagtgtatggttctcattcaaagaagaggcccaacaatctgattttgggtagaacgtatgaccaccacatatatgaccttgttgaagtaggagttgagaactacaagtcaatggaatcttatgtttatgataagaagctagcaccattacttggatcgaagcctttctttgctttcataggggaacactttgagagtgctgaagagctgaaacatttgaaagaagtgctgcttgatcttttcagaggagaggtcgtagagaatctgaaccttgctggtgtggatcggatctatgtgtgcactgcaatctctcccactaccgtctacatgatgcactgtgctctccgtctaaaaaggtcaggtacatctattcctaggatggaactggtcgaagttggaccttcgatggatctggttgtaaggaggcacagacttccagctgaaagtttaaagaaagaagctatgaagaccgctgaacatgctaagaagatgaaaaacgtcactaaggatccagtgcagggcaagctgggcaaggtctacatgccagaccagcaggttggaaagttgaccttatcaaacgacataaagggactaaagagggagcgccgtgaagccaagaaaaaccaggactcaaagaagcaaaaggtcaaccccgagtaaagatcactgaagtttacctttgcattggatacaggtcaggttaagaaaccctggtttgtatctgttcccatctgctgtgttatccaattagaagttgctcgttgtcagatagtgttaaatagtttagggccatcttgttaggctaaagacatgtgtacgactttcacaacaatattgcgtaccaattcatgttaagactgtaaccaggaacaaatttgagagtgttatcctatcaaacagccaacgtcttcctgaagtcccccaacccccngtttaaaaggaaagaattgttnggttaggcctttgggtgaaaccccaccgtttttaaaacctaaccccattcccccaaatnggaaaaatttccnaaacaaaccccnaaaaatgcccctnaaaagggtttttaacccccttnaat

SEQ ID NO: 5455 - DNA, 2796 bp, Zea mays
atgcataattttggaccgtgtcatgtttaggcggtgtttttgttttgtacttcagagcagcccaaaagaacccatccaaatgtacacctcaagacgagcctcccgtgttggtccagttgcaaacaaactctggcttctattgtggtggcccgtaaacgaagtgcggttggcttgcaacagtgaaaaggaaggctgcaaagcccatggaagggcccaagcccaacaatacatgcagagaccagagagttctctgtatgtgaagacgtcaggtgggcgtaataaagaacatttaaattcgtgggccagtcatgttatcgagaacatctcccatttttctcgctgtgtcgccacgcagagatattgttgggtggagatcttccgttgattttctagctccagcgttgtgttgataagattggagtagcgtgagctctcggccttgcgacgacctgagctctgtctccagccaaccaataccactagatgttagaaacttgggcgagcctcctgctcagtcaccgtggtttcgcctcgatgcatgcatccaattccaatcgccgcaatttgtgtgttttttttgttctgttagtttagtatcgcatgagtacgcttggaaaaatggccgaagcctacctcctccacttgctaaactttggcaaatcatcattagcgctaacccttcggtcttatcacaagagcacccacacttgcttagaagaaatccccacttgggccacttgccaatacagcccttcccacaaactggggggcgggaggaggttttcggtttagcgcaccccgacagtccgacgctggcaaccatctctgcggcatcggctgtggccgcctcgtgagtcacggcgcgctccaagggttccggcgcgtggcggccacgcgctctggcggtctgtccgttcggcggcaacagcgatggccgcagagtagaccgctgtcccggatccccgaaaagctcagaaaccgcggcgtaccagccacgtccgcggcgcgtccccagcccggacgcccgggtctacacggccgtcgctgtctgcctgtctgtcctccgccctcaacagagcgacagcggctggccgcagacgcaactgaatggaaggtggggcggggcacatgcattgcaccacctcttgcggagttccaaccgccgaatagcgacaaggtggcccgtgcccgcggcgacatggtagccttatcccctcacacgctgacatgacacgttcacgatcacgcagctctagcctcccccgcccgccccgcgaattttggagcccccacgccatcagtccaccaccaccacacaggcacacacacacacacactttcctcgcccaaccccagcgctttctcctcctggcttcccctatttaagagccgccccgtcgtcccgagaccgcgattcccaagcaaacagccaaacacacgcgaagaaaaggagatagagtacaggttacagacaggcagagagcaaagatgtgtggtggtgcgatcctcgccgagctcatcccgaccacgccggcgcgccgcggcggcgcggcgtggcccgccggcaagtgcaagcggcggaaggcgaacgacttcgaggccgcgttccgggagttcgacgaggactccgaggaggaggaggaggacgacgagggggtggtggagagcaagcccgccttcgtcgtccgcgcctcgtccgcggcgacgcagcccagggcgcgccaggagcagcggagccggcgccgggcgcccgaccagcagcagtacaggggcgtccggcgccgcccgtggggcaagtgggccgccgagatccgcgaccccgtcaagggcgtccgcgtctggctcggcaccttcccctccgccgaggccgccgcgcgcgcctacgaccacgccgcgcgccacatccgcgggcccagggccaagctcaacttcccctcctcctcctccgcctccgctgccggggcccccgccagccgcaagcgcgcccgcaccgccgacgccgacgccgtcatcgacctcgaggaacaagagcagcgcccggccgcggcggccctgaagcacgaggccgccgagtgctccggatccgacgcgctcccggacttctcgtggcagggcgtgtcggcggcgtacgacgaggcctccgcgccgcgcccggccttcgacttcgaggcgcggccggagagcgccgcggacgaggcgtcgccccgggcctccgactccgagtcggacgcgctgttcgactcgctcctcttcggcgaccagttcgccttcttcgacgccggcgcgtacgagtcgctggacagcctgttcagcgccgacgccgtgcagagcaacgccgccgccgcggcggaccaggacatgccgctgtggagcttcgacgacggctgcctcgtcgaggacaacctctcgttttaagcttcggcgactgttgctgtgtcttgagttttgtaaattacgacctgttttttttttggagtttctgctcatgtatatctgtatcgatggtgagctgaatgaaatcatccttctcaggaagtaaaacaaaggaacatccctcccttctaaaagtcatgaacacactaatttcataattgatcgacagcctaacccgactagaagatgcatcttctagaccatgttgaagacggaccctcgcctgctcgacggaggcacatgcgtgtccatgtttgggttgacgatataccactttttaaaaatctggaataattcagtgttgacaaatccggtttggcatacatgctactaaaaaatgagcaaaacaaatcaggattttgc

SEQ ID NO: 5456 - DNA, 2286 bp, Zea mays
acgcattctcccggccctggactattcttggtgggtggagagagccgcagaaggcagctggaagaggagaggaccgcgcgaggctccgtgccggcgagttcgggtgcttttcctgcggtccgagatgcgatcgttgggacccgggagacagcgcagctcgggttcgggttcgggggggcggtagccacctgagcaggatgtttaactggaacgacgagcagcaccaggtaagggatgcaatatgggctgaattcaatgagtgtgatgaccatattgtgccttgtcctaaaggtgcacaagatagcacgatagttagttccagggttcgcaagaacaatgaggaagaggtggctagtattgctgccatcactgaacagtctgcaggtgttcaaaatggacatcaagggatggaaaagcagactgcaagtcacacaagtgcacatatttcagccacacaaattgacatggaatcctggcctgatcttccttccctgaatcctacacttgatagaaattatagtgatgacaacatagcatccacatatctggatttttgtgctgcaaccagtttacaagaagtgaccggaaattctacagagcaactagatggtaaatcagaagtgtttggtaatgatcaagaagaaaagagtaacagtttccttgattgcgactggggcaatattggagattttgatgattttgaccgtctatttagccatagtgactccatatttggtaatgagatagttgccaacgacagtgattttctttctgcatcttcgaatttgatggatactgctgtgctatcaatcccaattccggtcgaagcacataagaggccagtgtggtcacgtagaaaaccagaggaaagaggtaaaagtaaaatatccagcagtacaagtggcttctcccacagcaaagtagagagttcatcgacgaatttgcaaactcctatggaacctgtacagactcctcaatatgcactgttccaggatagcaagaagataggagaagttcagcatgctaatcagtttatgtttcctggatatgggtatcctgcatatccatttcctaccattccgttagtgtcaaacattcaagctgaaggctatcagacaaaaccagctggcacaagctaccgaacttcggaagattacctaaaacagtcaagttccacagaaatgtcacaagatataccatcaagaccactaacaatgacaccacaagaaaagatagaaaagcttaggcgccggcaacaaatgcaagcactgatagctattcagcaacaacagcaacagtttggtcaacagggtcctggcagtgacacaatggtgtctcaagcatacacccctggtaacaaaaatccggattccttagggagttcaattgtcatagatgaaaacacaaataaggttatttcgcctgagatgattccaactgaccatgaccgggttcacaagagttctgcaatttcagatgatccctttatagaggaaaaaatatattatcagctacaagatgctcttggcaagttggataccaaaactcgactatgcattcgagatagtttgcttcgtttggtccatagtgcaacagagagaaagattgatggtgataggagcactaacaagactaataaagatgaagatgaagcttcggaagacgcatctactaggaaaacaaggtctccaaacaaggaagcagaaacaaccactaatccaattgatcgtatagtggcccatttgctgttccacagacattgctccaaggttgcaaaagcaacaaaagaaataatatcgtcaatccccttgactctagaacctgagccgaaggtacccttgggaactcctagggttccatcaaaagatcaacgagatgagcaagaaattgtgttgcaaccatcacaataatgtgagatgtgctagaagataaggttttactcaatttgagtaaacttatttgcatttagttagcctatgaatctaatgtcgtccttctaatgagtatagtacacatgctgattaatcaactgttcaggataaaaaattatgcaaatccagtgatgatggcagtcttatgatcacctgtggccccggagatcgcttgtgtaatatgtagccatttcaacattgtaggatccttttattttcatcctgtaagaacatctcagattgtataggaacctacgattttgtgccgagccgtaaaaagagcaaaccttggctctggacataaggcgtgtttaggagcaagaggattaaagcaaaccttggctcttggctctgg

SEQ ID NO: 5457 - DNA, 1585 bp, Zea mays
cgggtatttgtgttttttttgtcgttaaataataccaagataccaattaatcaatatctttctctatactaatcaattcaaaggcaaaagcaaagggagtaacttgccacagaattatagtatttcaattcaatgaatccaggaagttgcattcagatctccgtgactactaatttgacagaggagttgcacagcacaggttacatatctaatcttaggagctggaggcaaccgctggcagcctgaaactacagtccggttcatgctctccgggtcagaaaccagcaaacacaggtctatctccgacactgcctgcgccaacatcacccagcatacaaatccctttctgatatcttgtgaagcacattcgtcgacatgtagggcgacacacatccgcggacctgcaaaagagcagtaggtatctcaatgagaccctgttgcaaaagatcaacgctttgcaggcgctggagaggaacaggagttattagatataacaggcctttttgaatatcgacgccccttatgatgccaagcccaacacagtaagggattgatctggttccctcagatgcattggaaactgccaaaccaactatggttgcattcagactatgccatatctcaccagcaggtaccttacaatgaagatgcacaattgcaacatctgaaaatggtacttgataaggtggaagtgaagctagggcataagcaagctccttattagttgaaagagagatgttgcttggaaaacattgtttcaaatactctacaagtcggcgttcacgcattccacatgaatctttctgaattaacaacgatctatttgaggcatcatgaaatgcagcatcgatgttaatcatcataggtcctgtttgcccaccatctaaccaaaaccctccatcagggagatttttgttcttgattgtgatgcgtatctgaacaactattgtggggcagatataccttagcatctctacgagcatatcaaagccagcaccttttacccatccaggtgtattgacaattagtggcagcatttcattctcatcgcatcgatattttccaacaaagtagtcatacgaatggaatagacaattcagatatgcttctggatctcttttcgatgaaatgtcaccaaagaagtagcacctttcagcttcccgtaggcttgggttcatcaaatctgcgatagcttcgtcgaggacatggaacgagaggcatcccggcggcccgaactccggctgccccacgtcggtgtccagataagcaaccttaccatgcctggggagcagcgcgttgaggaggacacgggagaaggtggacttgccgctgttcttgggcccgcacacgacgaccaccgggggcgtggggtgggaggagacggtcgatacagcggagtcccagtccggcgggactaccgcctcggtgcggggcgccggggaagacgaccgcggaggtgttcgcgtcggcgtcgcgcggccgcgggcgccggccatgtcaggaagacctcgtcgtggttcgcagagggcagagggcagagcaagagcggcgcgagcccaagttcatcactcctgcttcctccggc

SEQ ID NO: 5458 - DNA, 1407 bp, Zea mays
gaactcgtaaatcttgtgttcctgtgtggctgctttcgttagatctctcggctatgtctatatgatcgtcttggccagcatctctgggttcttttcgcggccgagaggaaacttactaactgatcgagtgtgccaggcatcaatctgtcgaatcgtgactcgtcgctttttcatgtcttcagattttgtccatctgtcaaatcatgtggaaaaattggcatatcttcttgtattctcttctgtcctttttaatgcctccagcggattaattgcgagctccacgcccttcagcagcttcagcctggccggccggcctgctattaaaccactttgcttgcaagtccaagaaactgctagagaggaacaagctgagatctccagcatggggaggggaaggattgagatcaagaggatcgagaacaacacgagccggcaggtcaccttctgcaagcgccgcaatgggctcctcaagaaggcgtacgagctctccgtcctctgcgacgccgaggtggcgctcgtcgtcttctccagccgcggacgcctctacgagtacgccaacaacagtgtgaaggctacgatcgagaggtacaagaaggcacacgccgttggctcttcctctggccccccactcttagagcacaatgcccagcaattctaccagcaagaatccgcaaaactgcgcaaccagatccaaatgctgcaaaacactaacaggcacttggttggtgactctgtgggaaacttgtcactcaaagagctgaagcagctggagagccgccttgagaaaggcatctctaagatcagggccaggaagagtgagctgctggctgccgagatcaattacatggccaaaagggagactgagcttcagaatgaccacatgaacctcaggaccaagattgaggagggagagcaacagctgcagcaggtgactgtggcccagtctgtcgcagcagcagctgccaccgacgtggagctgaatccgttcttggagatggataccaaatgcttcttccctggcggccccttcgcgacactggacatgaagtgcttcttccccggcagcttgcagatgctggaggcacagcagcgccagatgcttgccaccgagctgaacctcggctaccaactggcgccgcctgacactgacgttgccaacaataaccctcagcagttctaaactggatccatgagaaagccaactgtgaccgatggaagctggctgttgcctctagatgatattggcttccataacctagcttattatggtgtgtattgttgccttttgtgtgtgattctccttactactgatggagaataaacctaatcgattgggcataatgatcaaatgctacagcacccgtgaggctgtgatcaggacatcatgtttaaaaaaaaaaagcggcc

SEQ ID NO: 5459 - DNA, 1986 bp, Zea mays
gcactgaatcacaaagctttgcaaaatcgtgtacatatcttacttggacggcaacttaattgactggtagccctggagaataatatgaaattctgcctgtctgccaactacaaatacctggtatgtcaacagaaactaagataaagaatacacggtgtcacttgccactcttcaagctcctggtgctgagactaattctaatacataataccagccagcagtttactgcagaaatagcaaaatgtgataaaaggaagctggggcacaactccctcctttcataggagtcggcttgataggttcctatgcagtaagtccaggttcgtcaggtgtaatttgagcgcggatcggctctcgatcaagacccttcgtcggcgacttgttttctagctcttctgcagatggaacagatggtgcaatgtcaactttggttgtttgctctgaaggcagtttaggtagagatttccgttggggcttcttcactgcatttgcagcaggtgctttcttgacaccattttgggagaccctttcatcgagactcagtcgacctgaacgagctggaggatttggattcccttctgtccctcctgaggatgtgttcttggagcgaccaagctttggtgacctagctcttgttgtaggtatcttcttcaactcaaccttggggggaggtggttccttataaaagctgggcattggtgttgccttgaaatttaaactctttctcagcattttgagttcagcttcttcagtttcctttgattttgcctgcaagttgcttttctctagttcctgtgcatgaatcttctcctcgagctttgagtagaactctcttcgtttttcagctctctcatcacacttaaaactaaatccatatgaaggagtgctgccaaccctttgaggtttcacactttcatttgattcttcttcaatatcctttttgacagaatgttggtttgatgccttctgagtttttttcttctcatttgagtcctcaagtgatggggtctccttggcaactgggcggaaactgctcttttcggcctttttcttactggaaccagcatcaccattgctcaaagagcaatcaactagatctggatcagaaaccccggccattgggcgccttaggataagaaggactaaaagagcttttcctagtttgactcttatccccgcctcgagggctctgtcgctgagatttagtaccaaccttcattgaatggccttgaaccccctcaggaactcgaggctttatgtcctgggactgcgaggtggcttccatttctacttcttcagatgggttgatcacctcgctctcgcccgaatgggctccatcagccagcacatcgtgttcttctgcgtgcccctctacactatcactgggcggcaacttccccgcggccccattgtcaaagcccaccgcaccaatagcatcagtaacctctgtactagcatccatgtgacgctaccgtctcaggatatctttaggccagattaaaaagacaacacccaagccaccagcttgcacaagctatccgcaatcaccgcaggatcatgctatgccgaccagcaaatgaatcagcgtcaaactagactgcgagagaaggaatcagctcccggcggatccgatctccgctccaccccagcggtgcccagtggggacaaggacggcgaagaatccgaccggaggcgtaaggcaggcgaggtctcggtcaaggaaacctggatctggccaggcgaaaacgatggggagtgaagaggctgaagcgcgcgggggaggcaaggattggagttgggcgcggtgaaggcgggagagcagcgacggtggcgcgccgccggcggcggcggcggcggaagggaggcagcgggggccgtgcgtggctcgtgctttgtctgggtttccagggtggtggtgtggtttcgattctctacggggcctttctcatttctgcgcccggcccggccggcctcgaggtacccaat

SEQ ID NO: 5460 - DNA, 2191 bp, Zea mays
gccggccgggctcgggatttgctccatttccatttaaacacacaagcacacgcagggcccccccggattcagatttcatcctcggcgtcgtctcctgtcctctccacgccaagcaacctccccaccccgccccaccctccatgctcgcctcgagatcttagcgggcagctccggagagcgccgacgagccccctgatccctcctcgccgccgccgccaaccgaccgggggaggagaggaggggaggggagcgatggagaccgccgactactccgggaagctcttcgtcggcggcatctcatgggagacggacgaggaccgcctccgcgagtacttcggccgcttcggtgaggtcactgaggccgtcatcatgcgggaccgcagcacgggccgcgctcgagggttcggtttcgtggtcttcgctgacgccacggtcgccgagcgcgtcaccatcgaaaaacacatgatcgacggccgaatggtggaggccaagaaggctgttcccagggatgaccacagtattgtgagcaagagcaacacaagcagcatagggtcacctgggccgggccgtaccagaaagatctttgttggaggtctgccctcaaatgttacagaggctgacttcagggggtattttgagcagttcggtgtcataactgatgtggttgtgatgtatgatcacaacacacagagaccgaggggctttggattcatcacctatgattcagaagatgctgtggacaaagccctgcacaagagctttcatgagctaaatggtaaaatggttgaggtcaagaaggctgttccaaaggagcagtctcctggacctgttgcacgctcacctgcaggagtggggcagaactatgctatgaacagggttcatagcttcttgaatgacttcaaccaaggttacaatccgaaccctataggaggttatggcatgagggtggatggaaggtttggccagctttcaggtgcacgaaatgggctctcttcttttggcccaggttatgggatgggtatgaacgttgaaggtaggatgagtggaacttttggtgcaaactctggtttcatcagtaactccaatgggaggcaaatgggttcatacttcaatggaagttcgaatagattgagtagttctattgggtatcttggttatgactcaggatcgatgttgagttccatgtctaggaattttaatgcaggtgtaaactacccgatcaatcctacaaacatgagtgcttttgctgcccttggaaatgggggtggcgtcaattatatgggtctcccttctattgcccctgagttggcccagttgggcaacatttcaagccttgggtcagggaactttagccgtggagctggagttaataacttaagcttaccttctggctcctatgggaggagcaattcaactggtacaattggtgagcctttttctgcatcaggcaatgcatatgaagtgaacaacccagatacatatgggaacaagctctatttatggtggcacatcctggaggttcccttcatctgaagttgacgtgccttctttcagtcatgatcttggaaatgttgatccgaatatgaaatcagacatatcagcaaattacatgggaaattattctgttagcaacaatcagccaagcagaggtatcacttcatagtgggagtattactacacattcatatatgacttgggatagatgaagcacccattcagtcaggcagccaggtgcgtgcatggcaactgtgaatgggtgatatgtcaggttagttttgtctagctgaccagcggtgtggtttacaacaccaacatgctagaggaggaggaagcggatacagaaacattttctgaggggcttcttttctttgagtcatgtttttagttttgattcctgcgcgtggctagctccttttggtttttgaatgagatgtgtagtggtgattattgcggcgcatattttagagatcgtggttcttccaacataagctggaaaaagaagtctgtatacggatgaacatgtataccaaccaaagggatgctgtattatcttgcccatttgttactacattagcctgtgttttatatcgttctgaaccgttcggttttgcactctggaggttttgttggtttgttcgtgagattatctcggccgggggcccggttcttctaaaaaaaaaaaaaaaaaaaa

SEQ ID NO: 5461 - DNA, 4419 bp, Zea mays
gccccccccgggcccgccgggcacacgcgagaaaccagaagcgctcgcgagaagtaagggagagagaggggggacgacgacagccttgggacccgcggactgcatcgctcgccggtagctgacgtcactcggccccgtggaattttcaagctttggtggtggctcgtctgtctgatccgcgctctgctgctttttcttcgcccgccgcactgtatcacaactataacagtacctacgtgttcacaggtctaggcatttgtcctaccagtacagtacattggactagtaataactagtatgtatccagcaaaccgccacatggatccatactactcgcactatagaaaccatgttccttacccatactatcctcctgccagatgggaaatcccatccggtcatccacaggcaatggactcatcttattattatcggccaccaaactgtggaacttggccatatcatgatatctcacatccttctgagttccattgttgctgcaaccgggcatatcttcctgattactacagtttcagacccccattccctcaagagcttccaccccctcatttatactatcacgtgccatctccacatcatccaaatgcatgtccttcttactttgtcccatcacatccttacccttttgatcagacaccatatggttatgaaaagttcaagagccactgctgtggatgtccaactcatgtgtgccctggggctgagaagaacaatgtgaaaatcgaggaacaaaggcctgatgtcaagcttgagagcggtgagcacaagaatgctgatagtgacagtataattcaacacccaaacaagaagtatccattcatatggctgccatcaggcaatatgaaaggcaaggagaatggagagcattatgaattgtcacctcaggttttaaatgaatgggctcctgtgagtgggaagtggttaggggatgtgaagcaacaagggcaggataatgagaaggggaaacaattccagtggccaatagtttggatgccagcaggatatgatgcaccaaaccaaaaggctaaagatatgaatgacacagaagagaccccaaaatccccaaagatttctgaagtgtctcctcaatcacccaagatcattcctctgtcttggtttgggaatggtcatcatcatgatcagaaatcggctgccagaaatggttctggagaccacaacaacggatcagcagtgaagaaccaacctgtggttactgaccatcaagacagcatgatactggaaggaaaccctaaaatcactccagctgtgcccaagagcatacacgttgggaagaaacctccaagggaaaactgcaagaccattccagttgtgccagagaaagagattaatgaaaagaaggccagtacttacagaaccattccggtcataaaagaaagtgatgagaagaagattggcatgagggaaaagagggagtcaaaggaggccaacagtgctgaaatggttgaagagaacaggaaaacaaaacacaatgactcatcagtagttaagcattcaaaattgcccccagtatgcttacgtgtggatcccttgccaagaaagaaacctggaaatggttcttctaggtctcctagtccaccaaggaaggatactgacaacacgaagaaggacgtggatgaggcccagagccagatcctggagcctaaacagtctagtacaagtaaggatatcactgtgtctgaagtgaaagaaaaatcgccttatgaaatgaagaaggaagttgggtttagaaatgaaacagtggaagctgcttctgttgaacatctgcaggaggaagaagctcccacaagtaaagatggccaaaaggtccaagctgctagcactacagttggtgatcaagaaaatgcagccctgaatagcatagaggaagatcatgtgcaagaaaatgctggtgcaggaagcttgaatggatgtgacaaaagaaaaaatgaagatgggacagtgattgaaagtgaaactgcgaaagatgatgccagaacatatggagttaatttgtcagaatcagatgctgcagttcgtattcagtctgcctacagagggtatgatgttcgaaaatggcaacctttggataaactctggaagatcaagcatgtgcatgaacagatgcaagttgtgaggaagcagattcaatgccttttagattcttgcagtaagccaacacaaaaagagcaagtggccataggtgaaactattatgaatttactcctgaagcttgacgcaatccagggcttgcatccaagtgtaagggaagctaggaagtctgttgctcgagaactgatttgcttgcaggagaagcttgatactttatgcaaagcagcatctggagacttgaatcacacagatagtaatgatgatgaatctgaggggaccaagaacattatccaaactgaagctcctactgtaataactgaagcttctgatagaaagagaactattgaactgggtaaggtacaagaaccatgttcagtggactccatggagccatgcaacacagttccatctggagtttcctgggaggtgaggccagatgtagacgctagcgaggagaagaatgaaaaacaagagtcatgtagcaccacagtggacgaagcgcacgaacaagtagcatcatcgatggatatgataagtgatgaagcttttacagctgacaaccaggagcatggaattggagaatcaaatgttacttcagtggaacaagtgactgaagaagagaaaccagcatctgaggatgaagtaaaagagccaccattggtgaactccacggcactattgtatgatactacttcatcaggggattccagtggactgaaacaatacacagcttcgaccgatcagaatctctatgctgaatcaaatacagggtcgtctcctgcatccactgaggacattgacataagtactctggctgtggaaagtgaagtggcggctgagaatgatggcccaattaacagtcaggtgcatgaaactgtagctctagaaaatgtggaaatgaaagatgatgtttcttctgctgaaaatgagcataacagatcgagcagccctgttattcatttagaggacccactagtgtctttgaaggatgttgagcagcatggtccaactcctactaaggactttgttgtacctaacacagaagaccaacaagaagccagagatatcagcttgcaggtacaagctgtggattccatgaaagattgtggcgaagtaccagatggaacaatagaggcttcgacgaatgatgatgaattagaactgggtacttctgcagatgtagaaaagaatgatcaacctaccttgctggaaccaagatcggagtctgtctctgtcccagaactgtccgtcttggatgaatctgacgataaaatgcaatgtggtgtttctggcaaggatgaggaagcacatgtggaggagaaaactgtaactattgctgttgacaaggtaacaggaggttctgcaaatttcgaggatcctctttgtgaggcatcgaggaaggaacctgacattgagaagagtcacccaagcctcggagaagaggaagacgatacaataggtggaacagtcttccctggttcaggtagctgtgaattatcatgtccacaggatggtggcatcgcagtctacgaggggcctgagatggtgtcaccagagagccaaactgatgctcggaaagaaaacatccattcagatgtcgctgagacagatgaatgcaccaagactcagaaggccgctctagcaggcacagagggagaaaattctgctgaagattctggtgtgccggtgtctgagatggacaaatgcaacgagatgccgaaggatgctccgacacttacagcagcaggtgcaaatcctgctgaagacgaagcttccctgaaagacctctctgtgcagacagagaacaaggcttcttctgcctccccagctcctgatgatccgaaggccagcgacgagaagacgctggcagaagagaaccagaagctgaaagagcttctgcaaaagcttctggcgtccggcaacgatcagatgggggtcatcacggacctaagtgagaaggtcaaggtgctggagcggaggctggcacgcaagaagagaccaaaggtgagggtgcacaagccatccaggcatgcttcctgtgtccactgaaaggataagtctgtaaggttttgaggttttatgttgtatggatccccatgttgcttcctgtgtccagctattgtgcactgtgtaggtatagccatgctgtggcactgtgcttcgtcttggacaacacaaggtgtggcatgttctgtattttatgtctgtataatgcatccaactacatctagtgttctgtgagcaattgattgggacaaatcgatatgacaaaaaaaaaaaaaatgtgct

SEQ ID NO: 5462 - DNA, 1906 bp, Zea mays
gggtaccgcgaccccggcgcccaacttctcgtcgtgccgttcccatctttcctttcctcttcccttccccgtcgatctcgtcggcgacgccactacctctcgccgtccggtgccaccatccgcctccgactcctgcgacccagccacggttcccgaggatacgggccgagtccggcgatgggggtggtggtagagcgggaggagtgggcactcagccccttcgcctacccgctcctctccgccgccgccctcgccgcggtgctcctcctcccttacctttccccgaggactgcgccgcacgccaccggaccctcgtctcccttcgacgtgggcgccgcacccttcctccggttccgccgcgccttcctcgtcctcttctccctcgcgtccgtggttgaaggtatccattccgtgtttggggaggatgagttcgtgcggtgtgggcttggcagagagcagacgaccgcgcgccttgcctctaccactgcagctgcgctgttccccggtgccatttctggcgtcatctccgacaaaataggaccacgaagggcttgcatattgtactgggtacttcagcttgcagtaggtgttgtgaagagtttcagtgcgcttcactgttcatggatcaacaatttcattctggcttttgcctcttcagtgttctctttctgttttgagacgtggcttgtgctggagcatgagaagcaagaccagaagcaagatctgctgtttgataccttctggctgatgacattctttgaatcggtgtcccttgtcggaagtcaagaaatcacaaatgtattggttagtgatgatgacagtagattcttgcttccctatgcatttgcagccacactatcggtagtgggcattctgtatatcagaaatgcatcaagtacatgtcagcatgcatctgccattgggagctaccaaaaatcatttcttgctcatgtcctcagagacaaaagagtactgatcctggtcttagctcaagcaagcatccattttgctgtctcagccttttggtttctctgggcaccaaccatagtggctgacggaaggtatgctcaactgtcagtaatctacccctgtttcttggcatcaaggatgcttggaagtgctggttttccatggttttacggagccatagcccccttccggaacgaggacagcttgacaatagcttacgttggtgctggactcgctttgtcgattgcggcttatgattaccaggagattgcaccactggtgatagtgttctgcatcttccatgcttgtgtgggcttcattttgccgtcactggccagattgcgaacaatgtacctgccaaatgagctgcgagggggcatgatgagcttttcaatgtcactggcaaatgccgccaccttcgttttcttgatacagggcagcgcccaccatcgacgcgttgcaaactcaaccatcctgagccttgcgtcctatggcctgttaggagctgggggctgcgtccatatgttgaggaggtggaggaagcacactcggctgaatgcccgtagtctgtaggagctggaggcacccaatgaatgctatacacactgcagggtgaacttgagagcggtttctgtagcatgctagtatctcacgttttgtttatctgactttttctggaaatatcaggaggtaggtgtaggatactacttttgttgttgttcaaagaaattgttgaaattgaaggttgacaaaaaatctgtgtacatgcgtcggggccatcaaactaacgtctgactttgatttttagcaattaaactcgaaagccaggaatctgtgtatgtatgtttggtttgtagtttttttttccaagtgttcgtttcatacattgtcttgatagtataaaaatcgctcgtaccatacaaaaaaaaaaaaaaaa

SEQ ID NO: 5463 - DNA, 2740 bp, Zea mays
gcacgacgtcgtagtctagtcaagcccgaggcctttacctagatccccctcctcccggaaaatgcttctcctgcacaaatctgttcccctccgcctgctccttccacgccgtcctctcaaaacctttctcctcccgccgccgtctcgcccccgctgtctctcgctcctcccacgcgctgccatgggctccgtagctggagacaccgccgcccgcctcgcgtacccgccggcccgccgcgacgattcggtcgtcgacgactaccacggcgttcggatcccagatccctatcgctggctggaggacccggactcggaggagacgaaagagttcgtggcgcggcaggcggagctggcggagacggtgctcgccgggtgccccgacagggagaacctgcgccgcgaggttacgcggctcttcgaccacccgcgccacgccgcgccgttccgccgcgggaacaagtacttctacttccacaactccggcctccaggcccagagcgtgctctacatgctggatgatttggacgggaaggcagaggttcttttggatccaaatactctaagcaaggatgggacggttgctctttcaacatattctatcagcgaggatggaaactacattgcttatgggctaagtgaaagtggtagtgattgggtctctattcatgtgatgagcattactaacaagcagcctatgcctgataaattatcctgggtaaagttctcatctatcagctggacgcatgacgggaaaggttttttctatggtcggtatccagcacctagaggaggggaagtggatgctggaactgagacaaacatcaatcttaatcatcagatatattaccatgttttgggatctgatcagtcagaggatatattgtgctggaaagatcccgaacacccaaagtattcctttggtgcctcagtcactgaagatggaaagtacatcatattgggcatctatgaaggttgtgaccctgtcaacaaattatactattgtgaaatttcttctcttcctcaaggaatagagggctttagagggacacaggatttgcttccgtttgtcaagcttattgacaattttgatgctcaatatcaagttgtggccaatgatggtgatgaatttacatttttgaccaataaaagtgcccctaagaataagctggtaagggtaaatatcaaaaatccagagctgtggactgatgttctctcagagcatgaaaaagatgtgctcgaatcagccgacgccgttaacaataaccaacttttggtgaattatatgtcagatgttaagcatattctgcagataagagaccttagaactggaaactttattcatcagttgcctttggagatcggttctgtttcagagatctcgtgcagacgagaagacaaggaagtatttattggcttcacaagctttctttctccaggcattattttcaggtgtaacttagcatctacaatccctgaaatgaagatgtttcgagaaatttcagttcctggatttgatcgcacaagttttcaagttaagcaggtttttgttcctagcaaggatggaaccaaaattcccatgttcataatgtcgaagaaagatatcgatcttaatggatcgcatccaactttgctatatggttatggaggattcaacataagcataacaccttcatttagtgttggtcgcgttgtgctatgcaagaacatgggctttgttgtctgtgtagcaaacattcggggtggtggagagtacggggaggagtggcacaaagctggagcacttgcaatgaaacaaaattgttttgatgactttgctgcctgtgctgaattcctcatttctaatggttacaccagttccagacgtttatgtattgaaggcggaagcaatggtggtcttctggttgctgcttccattaatcagaggcctgatctctttggatgtgctctcgctcatgttggcgtcatggacatgctccgttttcacaagtttacaattggtcatgcatggactacagactatggttgttcagataaggaagaagagttccagtggctcattaaatattctccccttcataatgtacggagaccttgggagcaaagctctggtaataactgccagtatccagcaaccatgttgttgacagctgatcatgacgatcgtgttgtgccattgcattcactgaagttattagcaactttgcagcatgtcctgtgtaccagcactgaggacagcccgcagacgaatccaataattggtcgcattgatcggaagtcagggcatggagctggcaggccaactcaaaaaatgattgacgaagctgcagacagatatagctttatggcaaaaatgttaggggcttcgtggactgaatagtgaattttgtccagcttagtgtggagatggtgagcaagattactctatgcagtcaaagtaaagtgcctgtaaaagttatattgcttatgttttgctcttgcttggatgatcatccaccaaatagtatagtgtttatgcttcggtttgagataagggttcagggagcattgtcatgcttggcgttggtgcaccatttctttcatatatatcttttgattgttaaattttatacgttactacttcattgattctaaattataagatgttttggttttttcagataaaaaaaaaaaataatgctaaatcgcgaggggggccctatgtctaaaagaaaggtgaattgagattttttctttctttcat

SEQ ID NO: 5464 - DNA, 2828 bp, Zea mays
gagaccccctggccctattgggctgagatcagccactacttagcactatttccatactgctgtcatgctgttactgttacagtagatagaaaagacagcaaggttgaccttttgccaacttcctgctgtagcaaaacaagagaagaatgcagcagatgccccttccttttcgcccccttttttttttttttttttttttttttttttttgactaattggagaaattattattgaagcaggcatcttacatacatttcatgccatacagaagtttgaatgtcttattaacttctaaaagcaggaaataatgtaatgagattaacttattttgttcgctcacatgaagcacaatatgatctgacttaaggctattatacaacaatatatggggaacaaaaacaggtacaatagacattgttgatagctggtcttccaaggagctttacagcaaagaatctgtctttgcaggtagcctcctgaagaagtttgctggtgctgatggcaccttgtggcgaaaccgaggatgcctcatcccgaagaacccaaggcagagtgcaaccacttggaatggtgtcacatacagtataatcgcagtaatcaggcaaaatatcaggaacatagctgttgcccttgggtccctccagctgagcagtgactgtaatctttctccctgagtggcaatgtccccaacaacagtctgtatcctcccagcaacgtgtcgtaacctatcgtacctcatccggatgagatctgggctctttgaggttgggaatgtgtcaaattcctcatcaagctcatctggaagtgcaacatcagcgtaagatattcttgtgttcatgtgtggtgggaagcgtggccggaaccggtaattccacagccctatcaagaacatgtagaggaaaattgttggcaggataaggtctggatagagcacaagcatgataaagagcacatggaccagcactgtggtgaccgggtttttccactgacaaacatcagcaaaccatttccctgcagcaatgaaccctgagaagacttgcataaggcggaagaagttagctttgctccgtcgcatgctccacaggtgagagcgagcatctgacataaactcaacaacttccctgcggactggtggctccatgcgtcccaggcgctgcgcaacaagcagcacagcttggtggcggagcatttcctgctgaactattgacagaggctgtgcgtagtgcatcttgggcaagagaggcctagagtatgtgaagagcacattgataagggatgtgactgtgaaccggatggcaaggtggagctcacccatctttttaactcctgatgggctgaggaagagcaatggatatgagtgcgtgtacacacgcgccgtgtcaagtgtcgaaagccgaatcctcactttcccgatgggtttatccatgtggcctgaggaaccgtccttgttatcatctccacttatgtgacagttgtcaaatagaccaattgtgagcacagttccatgatcaaagacctcccatgtgtactgctcgttgaaccgagggctcaagctgtcgactatcgtgcgcgtccggacccatttggaaccatacttggcaacacagtacgcatcacacgacccacggctgtttctggtcttcgttggattgagaccgttcgcacttaagatgccgacttcaagcatgccgattggtggcttccacagctgcttcatcgtcggacggagatcgctgcagtactgtgtggactcatcaagcacatggtaaccaccttcaaggcagacacgaaggcttaccttcgcatagaatttgtcttccttcagctggttcacgtcgatgatccctggccttcttagatcgaaccatgctgggagtaccggtttgtgatcagcccgccttggaagcctcgcgagcggtatgatagcctcaccaatcacctcgtctttgtcttgtgccacacggtctactactgatatgagcaagtcgtcctcaaacggctctgctgccacgaacatcagctcctcgttccacatgaagtttctggtcggcgagcgaacctgccttgtcctcagcagttgatggcccagcctcacttttaccagcacatcaggtatgcggttctccattgggtatatgtcctgtccctcaatcacattgactctcacataccacattcttggcgcggggtacaccttcccgcggatgtagctgtgaagatgggaatcaaccggtgtcgatcctgcatggatggcgcttgggaagcattcatctgcctgagtaccgtaccagactgcaagcatcagctcccctctgtccctcacgccgtccttgcccatcagacggtaccactccggtgccagtgggctgtccggagggaccctgagagggacctcattcagatcaatgctcactcggccgacatacccggcccgaaggacatccttgtccttcacaacgacttgaagcatcgtcgactgcatgacttccttggggaacgcgaaaacctcgtcccactcaggcctctggttcttctcaaagtgctttgtcttcatcttgtagtttccaaggtgcacctccacgtaagggtcaaggcttccagtgatgtccatgttgggcagatcgcgtgccttgaccacgcgcacgaagaggtactgcatcttctcgacaaggtcgtacgccccagccttctggccagggtacacccggccgccaatgacacggccgccgccaagcgttgggcttgtttccttgagctggaagtctacaggctgctgtggacctggagcatacatccttgacacctgaacctgaggctgaggggctgca

SEQ ID NO: 5465 - DNA, 3459 bp, Zea mays
cggacctggctacgaagcgcaggcagtacagacagcaccgcctggtttgagcggctgccgccgctgcatatactccctccctgccttccagtgccaggggtgaccggcgtgcgtgccattccacgctctcgcggctcgtgtgccagcggtgaccagcgctcgtgctcgtccagtccaccaggcgctgctgttccggcaagccagccagcagcagccgccgccgccgccgtctcggagctcgagctcctagtcccccggggccgaggcgccggcgccatggaccagctccggcccgagccggccgcgggcgcgcacgagatcgagaagacggcggcgccggacgtggagtcggagcccgcggcggcggtgccggagccggagcgcgtgccgccgtggcgcgagcaggtcaccgcgcgcgggatggtggcggcgctgctcatcggcttcgtctacacggtgatcgtcatgaagctgagcctcaccacggggctcacccccaccatgaacgtctccgccgcgctgctcgccttcctggcgctccgcggctggacgcgcgccctcggccgcctaggcattgcctgccgccccttcacccgccaggagaacaccgtcgtgcagacctgcgtcgtcgcctgctacaccatagggttcggcggtgggttcgggtcgttcctgctgggcctggacaagaagacgtacgagctctccggggtgagcacgccgggcaacgtgccggggagctacagggagcctgccatcggctggatgaccggattcctcctcgccgtcagcttcgtggggctcctcaccttgcttccactcagaaaggtgctcgtcatcgactacaaactcacttatccaagtgggacagccaccgcggttctcataaacgggttccacacacctcaaggagataagaatgcaaaaattcaggtccgtggattcctcaagtacttcgggatcagcttcctgtggagcttcttccagtggttctacaccgccggcgaccactgcggattcgcccagttccctactttcgggctccaggcttttaaccagacgttttccttcgacttcagcctgacgtacgttggtgctgggatgatctgctcgcacctcgtcaacctctcgttgctgttcggtgccgtcgtttcctggggcgtcatgtggccactcatcggcaagcagaagggcaactggtatccggcagatgcatctcagaatagcatgacaggcatctacgggtacaaggccttcctttgcattgcccttctcgtgggagacggtctctacaacttcgtcaaagtcatagctatcactgtcaagaacatacgcgagagatcacgtcgcaagaacctgaacagagtggcggacgcggacacgatggcgctggacgacatgcagcgcgacgaggtgttcaacagggacaacatcccgacgtggctgtcctacgcggggtacgcggcgctgagcctgatcgcggtgatcgccatcccgatcatgttccgggaggtgaggtggtactacgtggtggtggcgtacgcgctggcgccggcgctggggttctgcaacgcgtacgggaccgggctgacggacatgaacatggggtacaactacgggaaggtcgcgctgttcgtgctggcggcgtgggcggggaaggacagcggcgtggtggccgggctggtggggtgcgggctggtgaagcagctggtgctcgtgtcggccgacctgatgcacgacttcaagacggggcacctgacgctgacgtcgccgcggtcgatgctggtggggcaggccgtgggcacgctgatggggtgcgtcctggcgccgctcaccttcatgctcttctacagggcgttcgacgtgggcgagccggacgggtactggaaggccccctacgcgctcatctaccgcaacatggccatcctcggcgtggagggcttctcggcgctgcccaggcactgcctgcagctgtgcgcggggttcttcgcgttcgcggtgctggcgaacctggcgcgggacctgctgccgcgccggctcgcgcggctcgtgccgctgcccatggccatggccgtgccgttcctcgtgggcgccagcttcgccgtcgacatgtgcgtggggagcctcgtggtgttcgcgtggcacaggctcgacggcaagaaggccgcgctgctggtgccggccgtcgcctcggggctcatctgcggcgacgggatctggacgttcccgtcgtcgctgctcgcgctggccaaggtcaagccgcccatctgcatgaagttcacgccagggagctagagggcgcgctgacgatgcgtacagaacagagggcatcgttcgtcgtttgtggggtggaatccgtgtagtagaattacataccaatcaggcctgttctaatgtccatatgagcttaatgtacggtgtatatatgtaaaacggaaatctgaaggatgacaggatgaattgcctgttgtctagtagcacgcatattattattattatagcagagcactaataaaactctttatcttacacaaagtgttactgcaactgcaatgccccaacgctgttcagcagatcctggtgcgctcagccctcttccgctgcagtggagcagcttcactcagcggcaccgtttggaagttgaaagagaaaactgagcacggcatctccgtccgtgcgcagtgcatggcacagtcgtcggtacgcgcccgcctaacccgtcggcatcaacgatgatgcttccttccacagccacggttcgctcaacttgcccaacggttcctcagttggcaccacacacagattgtggttgtggccggtggggtgcggtacctctccgcctttttggcgtttggtgcctcacgccgccactacctacaggcggctagaggttccaaactcgctgacaattcgacacattgaatgaatcgatgctcgatgaaggatgcatgcatcaaaaagggtggccggcgtgcctcgtctctgccgtcacttctgttctcggtgacagacgtccccaagctttgcccctctcgttgcttcggtggtgctgtggagctctgaacaagagggcacggacattctccggttaccatcaacctcccgtcggtagtgaaggttgctgtcgtgctacactcggtggtcgtagcgggataggcttcactgagcaatcggatagatcgggactctgtatacgcgcatcgttttgcactatcatgataacggaacagaataatctagatgctgctgtatccaatccaactgcaccggcgactgaggaggagagctggctaagcaggaccgacgaatttttcccccgtctgtcaactccacgtccacatgcgtgagtcaccgtgacaccgtcctgtgcgtgagggtgatatccaaacggaccacccgaaacggatatattgaagcacgacccatttagcacgacacacggctagatccgaataatta

SEQ ID NO: 5466 - DNA, 1962 bp, Zea mays
cattgggtacctcgaggccggccgggagcaagagtgggcacctccgcgcccgcccccctgcttcctgcttttcgtcctcacctcccttcccccactctcttctctccccgcggcccgtgactcatccacccacagtccactcgccactccccccggaacggcggcggcggcgacggcggaggagtaacgcaagatggcgaggaaacctctcgactacgaggagctgaacgagaacgtcaagagggtgcagtacgcggtgcgcggggagctgtacctccgcgcctccgagctgcagaaggagggcaagaagatcatcttcaccaacgtcggcaacccgcacgccctcggccagaaaccgctcaccttcccgcgccaggtggtggcgctgtgccaggctccgttcctcctcgacgatccccacgtcggcctcatgttcccggcggacgccatcgctagggccaagcactatctcgccatggcgcccggcggtctaggtgcgtacagtgactcccgcggcatcccgggaatcaggaaggaagttgccgacttcatccacaagcgtgatggatatcccagtgatccggaactcatctacctcacagacggtgccagcaaaggtgtgatgcagatcctgaacaccatcattagaaacgagatggatgggatcttggtccctgttcctcagtacccactttattccgccaccatttccctctatggtggttctctggtcccgtactacttggaagaagaggctaactggagcctcgactttgtgaatatccggcaaacagtggcggaggcacggtccaagggaatctctgttcgagcgatggtgatgataaatccaggaaatcccactggccaatgccttagtgaagcgaatataaaggaacttctgcaattttgctaccatgaaaacttagttctgctagcagatgaagtgtatcaacagaacatttatcaagatgaacggccatttataagcgcaagaaaggttatgttcgacatgggtccaccaataagcagtgagcttcaggttgtttctttccacactgtgtcgaaagggtactggggagagtgcggacaacgtggtggatacttcgaaatgacaaatcttcctcccaagacagtagatgagatctacaaggttgcatcgatagcactgagtccaaacgttcctgggcaaatttttatgggagtaatggttaaccctcctaaacctggagatatctcgtacctgaagttcgctgctgaaagcaagtccatccatgaatctttgaggaggagagcacgcatgatgacagatggtttcaacagttgccgaaacgtcgtgtgcaatttcactgaaggagctatgtactctttcccccaaatacgtctgccaccgagagctattgaggcggcaagaagagccggcaaatcagcggacgtcttctactgcctcaagctcctggaggcgacaggaatctccactgtcccgggctctggttttgggcaaaaggaaggggtgttccaccttcggaccactatccttccagcggaggaagacttccctgccatcatgtcgagcttcaagaagttcaacgactcgttcatggagcagtacgagggctactccaggctgtgagcaggaagagaaacaagagtttacagatctgaagaagagattattgattggaagcttattagttattgtaactcccttgaaaagcaggttgtgcggggattattgtttattgaataaaaagtccgccatttgattctactgccataccagtatatataattgtgaattggcttgtacttgctgctggtggggagaggtggaaatagctagccctccttgaccgcgcgcgataagaatgtcgcctcttgttctggagattattggagagttgaatagttcataatcagcctacctacaatatattgcagaaaaagtactgatcagtcccggcc

SEQ ID NO: 5467 - DNA, 2865 bp, Zea mays
gcacgagaccattacctacccgccggccggcgcggcagttcgccaccatcgtgctccgtacacgctccgctccggccatggccgccgccgcggcctccttttcggccctgccgttccttctacttttgctgctggtgccgtcgctcgacggcgcctccaatgtgacgtacgaccaccgctccctcatcatctccggccgccgccgcctcgtcatctccacctccatccactacccccgcagcgtccccgagatgtggcccaagctggtggctgaagccaaggacggcggcgccgactgcatcgagacctacgtcttctggaacggccatgagatcgccccaggccagtactacttcgaggaccggtttgacctggtgcggttcgtgaaggtcgttagagacgctgggctgctcttgatcctgcgcatcgggccctatgtcgccgccgagtggaattatggaggcgtgccggtgtggttgcactacgtgccaggaacggttttcaggacaaacaacgagccattcaagaaccatatgaagagtttcacgacatacatcgtggatatgatgaagaaagagcagctcttcgcttctcagggagggaacattatcctagctcagatagagaacgaatatggagattattatgaacaagcgtatggagctggcggcaaaccatacgccatgtgggcagctagtatggctcttgctcaaaacactggtgtcccttggattatgtgccaagagtctgatgcccctgatcccgtgataaactcttgcaacggtttctactgcgatggattccagccaaattcgccaaccaagccaaaaatttggactgagaattggccaggatggttccagacttttggtgaaagtaatccccacagaccacctgaagatgttgcattcgctgttgcacgttttttcgagaaaggtggcagtgttcaaaattactatgtgtatcatggtggcacaaattttggtcgcactactggggggccattcattacaactagctacgactatgatgcaccaattgatgaatatggacttcggagatttccgaagtgggcacatctgagggaacttcacaaatctataagattgtgtgagcacaccctgctttatggaaatacaacgtttctttctctgggtcctaaacaagaggctgatatttacagtgatcagtctggaggctgtgttgcattcctggcaaatattgattcagccaatgacaaagttgtcactttccgtaacaggcaatatgatcttcctgcttggtcagttagtattcttcctgactgcaggaatgtggtgttcaacactgcaaaggtgcaatctcaaacttcaatggtgaccatggttccagaaagtttgcaagcatcaaaacctgagcgatggagcattttcagggagagaactgggatttggggtaaaaatgactttgtccggaatggatttgtggaccatattaatacgacaaaggactccaccgactacctatggtacacaacaagttttagtgtggatggaagttactcctcaaaagggagccatgctgtccttaatatcgactccaatggccatggtgtccatgctttcttgaataatgtgctcataggtagtgcatatggtaatggctcacaatcaagattcagtgtcaaattgaccatcaacctgaggactggaaagaatgaacttgcccttctaagtatgactgttggtttacaaaatgcaggattcgcttatgaatggataggagcaggctttacaaatgtgaacatctctggtgtgagaactggaatcatagacttgtcttcaaataattgggcatacaagattggactggaaggggaatattataatttgttcaagcctgatcagacaaataaccaacggtggataccacaatccgagccaccaaaaaaccaacctttgacatggtataaggtaaatgttgatgttccacaaggagatgacccagttgggatagacatgcagtctatggggaaaggcttggcttggttgaatggaaatgccatcgggcggtattggccgaggaccagttctattaatgataggtgcactcccagttgtaactacaggggaacatttattccagacaagtgcaggacaggttgtggacagccaactcagagatggtaccatatcccacggtcatggtttcatccctcagggaacatcctcgtggtctttgaggagaagggtggggatcccacgaagatcacattctcaagaagagctgtgacgagcgtgtgctcctttgtgtcagagcacttcccttccatagacttggaatcctgggatgaaagtgccatgaacgaaggcacacccccagccaaagcacagctgtcttgccccgagggtaaaagtatatcttccgtgaagtttgcgagcttgggaaaccccagtggaacctgtagatcataccaaatggggcgctgccaccacccgaactccttatctgttgttgagaaggcctgtctgaacaccaacagctgtacagtctccctgacagacgagagctttgggaaggatttatgccctggagtcaccaaaacactcgccatcgaagcggactgttcttagtgacctacggagtacgaagtactcggtgtgcatctaggttccactgcaagtatgcccgtcaaaattctaaaattgtagtgcttgttgcacggcaatgctattgtaacctggatttgaatgtatccatctgagataggttatgtttcaggagctttcttaaactaacgttgttgctgagcagcatggattgaaatagcaggctatggcaaatgacggctaaaaaaaaaaaaaaaaaaaaaaaaaaaaaaaaaaa

SEQ ID NO: 5468 - DNA, 1055 bp, Zea mays
gatttaatgtgttattatttttgaaatattttttacttgtagtcatttaatttttaataacgcatatgaatctctaaggttttattacgacaaaaaatactcacacgttacgcgtttcggccgatcttgtccgcggtctgcctccctgacttttgttggcgctagccgtgtcggcccgggccggccaagtcccaagtcccacccaccaaacccaacacatcgtgtctgcgttctccccctttacgccggcgagtgttcgtcgctggctcgctgcagcggggagaatagaggcagagagcagggatgagcgacgagcgggtgaaggcggaggcgctgcagatcctgggcctattccaggtgctcccccgcctcgtcgtcttcgacctcgactataccctctggcccttctactgcgagtgccggtccaagagggattcgccgagccttttcaggcacgccaggggcatcatgtacgccctcaaggagaaggggatcgacatggcgattgcttctcgctcccccaccccggacatagccaaggtgttcctcgacaagttggagttccagtccatgttcgtcgcccaagaaatattctccagctggactcacaagactgagcatttccaaaagatccaaaggaaaactgggattccctacaaatccatgctgttctttgatgacgagaacaggaatattgaagcagtatcaaaaatgggagtgacgagtgttttagtagagaacggggtgaaccttgacatgtttaagctgggtctcagtaactttgcaactaactgtgctgcctccagcagaaaggatgacgaataacctcgagaagtgatacatagaagaaaataccttcaaaacactgtactcgaattcattgtaatcaatttgcccgattcatgaacaatttattggtgaaagatgacctcacagactagcttttgaactgatgcaacgcctgtctaatatatttatttgaaggcaaatcactccatgtcattatttcacgtgcaaagcaaatatattggtgcatatcaattttgtggccccta

SEQ ID NO: 5469 - DNA, 2332 bp, Zea mays
  misc_feature (2311)..(2311): n is a, c, g, or t
ttttttttttttttttggtaattagcgaatatatatatatccatatttactagacaagccccccgggcccccagatccgtccacccccacgctccgatccagcccgtccagttcgacgcgaagcggatcgtagccgtccgaatccgaggggtggacccgtgaattccgggaaggacgaggggtagttggctaccggttaaaacgcccgtgccagtggcccccgtcttcctcctctcctacgcgggcggggaagccaaggaagaagtagtagtagttcgctggaggagttggcctcgtcctcggatccagagcgcggaaacccgtgcgcgcgtccggatcgacccgctcgctcgacggccgcgggcgcgaggctagggatcaggatcggcggcggcggcggcggcgatggggaagtccgtggtggtgggcgcggcggtcgtggcgtgcgcggcggtgggggtggcggcggtgctggtgcaccgccggcgcaggcgcgacgccgcgctcctggggtccgcggaggcggagaggaggcggcgcgcggccgccgtgatcgaggaggtggagcgcagcctcgccacgcccacggcgctgctgcggggcatcgcggacgccatggtcgccgagatggagcgcggcctgcgcggggacatccacgcgcagctcaagatgctcattagctacgtcgacaacctccccaccggagatgaacatgggctgttttatgcactggatcttggagggaccaacttccgtgtgctgcgagtccaactaggaggaagggagaaacgtgttgtcaaacaacagtacgaggaggtttccattccaccgcatttgatggttgggacttccattgaactatttgatttcattgctgctgcattggctaaatttgttgatactgaaggtgatgatttccacctcccagagggtaggcagagagaacttggtttcacgttttccttcccggtgaaccaaacatcaatatcatcaggaacactcatcaagtggacaaagggcttttccatcaatggcacggttggtgaagatgttgtttctgagttgagcagggccatggagaggcagggactagatatgaaagttacggcattggtcaatgatacagttggcacattggctggtgggagatatatggataacgatgtagttgcagccgtaatattgggcactggtacaaatgcagcatatgtggagcatgcaaatgcaattcctaaatggactgggttactgcctaaatctggaaacatggtaattaatacggaatggggaagctttaaatccggcaagcttcctctctcagaatacgacaaagccatggactttgaaagtttgaaccctggagagcagatatacgaaaaaatgatttctggcatgtatctgggagagattgttcgaagaattttactcaagttggcacatgacgcttctctatttggagatgttgttccaactaagctggagcagccatttatattgaggacgccagatatgtcagccatgcatcatgactcttcgcatgacctcaaaactcttggatctaaactgaaggatatagttggggtcgcagatacttccctggaagtaagatacattacccgtcacatctgtgaccttgtcgcagagcgtggagcacgcttggctgccgcaggtatatatagcatcctgaagaagataggccgggacaaagtaccaagcagtggcagtaaaatgccaaggactgtaattgccttggatggtgggctctatgagcattacaagaagttcagcagctgcgtcgaagcaactcttacagacttgctcggcgaagaggcctcttcctccgtggttgccaagctggccaacgatggctctggcattggagctgctctccttgcagcctcacactcccagtatggcgagagtgactagtcttgaaaactggtgtggatcgaacttcgagtgtagctctcatttttatctttttttcccttcaaaacatccctaatattccggctctcctcggggaatttttcggcttcctttcttggctattctgtggatgcacttaaggctctgcagcgggatatagctagtatagagccaatcagtttggaggttatctaatggcataaggtttggacggcaggaacatagaaatggaagctgaacaatgccattcatgttctgcccagtttttcttctccttgtatggtgttgtaaaccaatcaaaacttttaacctttttgtgttggcaataaagaggaggcacgataatttgaccaaaaaaaaaaaaaaaaaaaaaaaaaaaaanctcgagaaaggccgcggtacc

SEQ ID NO: 5470 - DNA, 1813 bp, Zea mays
  misc_feature (1791)..(1791): n is a, c, g, or t
ccggccggggtcccagtcccgcgcactgcccccggtctctctctctcaacacaccgataagcccagtccaccggatctcccgtagtccagagactgagttgaaggaaggaagccatgatgatgatgggcgaaggcgtgagcatgccgccgtggtcccaccacgtccctgtgagcggcgtcgacgaaggcgacgagatgacgccgtacccgcgacccgcgcaagtaccactactccggcgccgcctgcccggacttccgcaagggcgggtgcaagcgcggcgacggctgcgacatggcgcacggcgtcttcgagtgctggctccacccggcgcgctaccgcacccagccctgcaaggacggcacggcctgccgccgccgggtctgcttcttcgcgcacaccgcggaccagctgcgcgtgctcccgcccacgcagcagcagcagtccagccccaggggcgccgcctgctcttccccgctcgccgagtcctacgacggctccccgctccggcgccaggcgttcgagagctacctcaccaagagcatcatgtgctcgtcgccgaccagcaccctcctgtcgccgcccaagtcgcccccgtcggagtccccgccattgtcgcccgacttccgccgtgggtgctggccgggcgccgggtcccccgtcaacgacgtcctcgcctcgctccgccagctccgcctcagcagggccaactcgtccccgtcgggcgggtggtgcggctaccctgcatccgcggtcgcgtacggatcgcctacggggggcgcgatctacggcctgtcctccaccccgagggccaccgccgcatccggctacatggccaacctggaccctctcgacgtcagcttcggcggcgacgaggagcccgtggagagggtggagtccggccgcgccctccgcgcgaaggtgttcgagcggcttagcagggagggcgctgtttccggcgacgccggtggccccgacgtcggttgggtctccgacatcatcaactgaggcggcggcgggaccctggcatggcagtggcaatggcaataacaatgggcacggagaaaggtgatggtgagccgtaacggagaaggatggtatccaaaaaaaatatttccctatatttaatttcgttcctcagttaaatccgataatccccgtgtacatatctatcaccctgtgaatattctcagttggtaagagggaggatgctaggtggtggaagtggaaggaggggtggatttgttttggggttcttgaggtagtagaaaatatccaagaaaaatagaaaaaaaaagtgtacagcagatgcagtaggcggtggcggtggttgtgtccctcttctgtgcatagggttagggtgttggtggcgaagcatggcggcggctgatgtgacgacgaaggcgggccggatttccaccacggcttggtatttctgtgattccggaacatggtagtttgatgttgttttttttaagttagtggactagttggcgattgcaacctgcttgtggattactctcccattttgttatgtaatctgttaagacatcagcattccctacagcatattttgtgtacctacatcttagtagttgccgaaatctcaatcaaaatcacccgctattggaggtgaatttcccatgtaatcttctgctcatgtaaatggttttctttttaatgaatcgatgtttatcgccctgaaaaaaaaaaaaaaaaacccgcggcaaaaaaaaaaaaaaaaaaaaaaaaaaaaaaaccaaaaaaagaaaaaaaaaaaaaaaaaaaaaagnactcatcgttgttacccctgtt

SEQ ID NO: 5471 - DNA, 844 bp, Zea mays
cccggtttaaaagttgggtacctcgaggccggccgggacttctagagtttagctatagcctcactgctagagcgccgccatggctcaggtaaggggcagtgctcgtggcactggcagtggcagcagcgccgccgcgctggcgctggtcctcctgtgcgcgctcctccgcggcgagttcgccgagtcggcggtgtacacggtcggcgaccgcggcgggtggagcttcaacaccgccagctggcccaacggcaagcgtttccgcgccggcgacgtcctcgtgttcaggtacgacgccagggcgcacaacgtggtgcccgtgagcgcggcggggtacagctcgtgcagcgcgcccgagggcgccagggcgctcgccaccgggaacgaccgcgtcacgctgaggcgcggcgccaactacttcatctgcagcttcccaggccactgccaggccggcatgaaggtcgccgtcaccgccgcctaggcactgcagggcggccaatcagccggcggagagcgccgcgctcacggagtagtaaagcacgtagctaattagacggtgctgcccttgttgttcaataatatcgtctgtcgtcccgtacttcataacctgcgcggcgtgttagtagttgtttggtggtgtttggcgactggcactataaagaagggtcagatcgagtgatgtacttgctaccaataaaggtatacgggtttgtgtgttcaaaaaaaaaaaaaaaaaagcggccctattccaaacctatagagagctaatggctaattaaagtgtaagcggccgttgagaaagtatattaaataattagctagcctaaaaaaaaaaaaaaaagcgggc

SEQ ID NO: 5472 - DNA, 2491 bp, Zea mays
ttcctcctcgcccaccaccaccgcacgccggacaaaaccgctctcctcgccacattcgcagcccccctcgctcgcgcacacgccacaccacaccaccagtacactgctctacgccggcccggacagtacagcagcgggcggctggctgcctaatctctccagctctttcgtcccctcgccacgccgcccaccgctgccgcatcatccgcccgttgcccgccgtcgtcgcctggcccgcggcttccgcccccattcgccgtcgcagcgcgccgagccccgtcccagatcgccgcggcgcttcctgccgccgtcggcgcggcgcagggttgaaatctatttgaccactcagttataaccatttctggtctgaagatgcttcgtcaatgacatctggaaactgtaatagtatgcgctgatcttctatgcttcaccacctgactatcaatgggctctttcctgtggaaacagcccagctacctcttcattttgataattcttcaccttgttgctcatgaggcaagaacgctgagttcagatggtgaagcacttcttgccttcaagaaggcagttacaaattcagatggagtctttctaaattggcgtgagcaagatgcagacccctgcaattggaagggtgttagatgtgatagtcatagcaagagagtgattgatctgattcttgcataccacagattagttgggcccataccacccgaaattggaaagttaaatcagttgcaaaccttgtcactgcaggggaacagtttgtatggttcactccctcctgaactggggaattgtaccaagctgcaacaattgtatctacaaggaaattatttaagtggatacatcccttcagaatttggcgatctggtggaactcgaggcattggacttgtccagtaatacattgagcggatctgttccacattctcttgataagttgtccaaacttacatcattcaatgtttccatgaacttcctgacaggagccataccatcttctggttcacttgtcaatttcaatgagacatcctttgttggcaaccttggtttatgtgggaagcagataaacttggtgtgcaaagatgcacttcaatcaccatcaaatggtctgcagtcaccttcaccagatgacatgattaataaaaggaatgggaagaattcgaccagacttgttataagtgcagtggcaacagtgggagctctcctattggtggctttaatgtgtttctggggttgctttctttacaaaaattttggaaaaaaagatatgcgtggtttcagagtggagctctgtggaggctcttctgtcgtgatgttccatggggacctcccttactcctcaaaagacatcctcaagaagctagagactatagatgaagaaaatatcattggagcaggaggcttcggaactgtttataaacttgcaatggatgatggcaatgtctttgctttgaaaaggatagtgaaaacaaatgaagggctagatcggttctttgatagagaacttgagatattgggaagtgttaaacatcgctatttggtcaatctccgtggttattgcaactccccttcatcaaaacttttgatatatgattatcttcaaggtggaagtctggatgaagtgcttcatgaaaaatctgaacagttggattgggatgcacgtattaacattatacttggagctgcaaaaggcttgtcttacttgcatcatgactgttcgcctcgaataatacatcgtgatattaagtcgagcaacatcttgcttgatggcagtttcgaggcccgtgtatcagactttggacttgcaaagcttttagaggatgaagaatcacatattactacaatagttgcaggaacatttggctaccttgcaccagagtatatgcaatttggcagagccaccgagaagactgatgtctacagttttggggttttggtactcgaaatactcagtggaaagcggcctactgatgcatccttcattgagaagggactaaacattgttggatggttaaattttctggctagtgagaaccgggagagggaaattgtcgacctgaactgtgaaggagtgcagactgagaccttagatgccctgctctctcttgccaagcaatgtgttagctcctcgccagaggagaggccgacaatgcacagggtggtacagatgctggagtcggatgtaattacaccgtgccctagcgacttctatgattcagagtagtctcctggacaagccacgctgctgctagtttcccgtgggggcgcattcctttattctttgcgtatattgtgtaaatgcattgccgcggtgtttggtctccaatcggctggctcaacgggtgacttttttttgcgtctgtatacctatgtatgtatctgtcatggtacaagttggctatatgctgatttaataataagagagaacttactagtaaaaaaaaaaaaaaaaaaaaagacggggggcccggtacccaaaaaaaaaa

SEQ ID NO: 5473 - DNA, 2188 bp, Zea mays
ggccgcttttttttttttttttttcaaaatgaggtttataataataatataataaaaactccaggccaccgactggcctcgccgccggcccccgattccccctccccctccccttctgccccccggcaagacggcaagggattaacaacctaacctgactcgtggcgggacggatgacatccccaaaaccctaaccacgcgacgctcgccgactcgccgtcacagccgcacctcaaccggagtcgaagcgccattgatgaactccgagcctgccgtggccgcagctagcgatgcacaagctcctcccacgcgccgcctccttcctcgacgcagccgccgccgcggcccccctgctgctctccttcccacgcatgcccacgctgcggctgtctggtagcccattcgtagccatgcgtcctggcggaaaccctagccgtatccgtgcgccgccgtggctgcactgtgacgctgggtggaggcggggactctgttccgccgaggctgcgaggcgcgggggcgatacagaggagatggagaaggatggcgggggtcgctcggcgccggagaggaagcagagatgtcggaatgatgcgctggtgggaaggggggagctgcttaccattcccggagtcgggccacggaacctgaggaagctcgtggacaagggattcgatgacgtggcgcagctcaagcagctctacagggataagttctttggcaagtctaatgagaagatgattgaattcttgcaaaattcagttggcatcattcacaagaatcatgctgagagtataactttgttcattaaagagagtgttgatgaagagctgaaaggcaccgatacatctaagcttcctaaaaataggaggttgaccttttgtatagaagggaatatcagtgttgggaaaactaccttccttcaaagaatagctaatgaaactatcgaactacgtgaccttgtagaaattgtacctgaacctattgctaagtggcaggatgttggccccgaacacttcaatgtacttgatgctttctatgcagagccacagaggtatgcatacaccttccagaattatgtatttgtgacaagggtcatgcaagagaaggaatctgcgtgtggaataaaacctcttaggctgatggaaagaagcgttttcagtgatcgaatggtttttgttcgtgctgtgcatgaagcaaactggatgaacgagatggaaatcagcatttatgactcttggtttgacccagttgtgtcatcactcccaggtcttgtacctgatggttttatttatctaagagctagccctgatacttgtcacaaaagaatgatggtgcgaaaaagatcagaggaggctggtgttactcttgattaccttcgaggtttgcatgagaaacatgagagctggttacttccatccaagggaggaggttctggcgtgttgtccatcagtcagcttccagttcatatggagggctccctgcatgcggatatacgagatagggtattctacttggaaggagatcacatgcattcaagtatccagaaggttcctgctcttatcctggactgcgaacatgacattgattttaacaaggacatcgaagccaaacgacaatatgctcggcaagttgcggagttctttgactttgtgaagaaaaagaaggaatctcttacagcagagtcagagacggctgatggtgataagagtataaacaaacagattgtgctgccgcacggaggtggtttgtgggtgcccggaagcagcccgttaccagaatcagctctaaaatcatttgatttcaggagaacgatgtcttcctcgacttaaggtgggcaaacatcccaatggcgctatcaatttctgccgacaacctgcattggtgtggtccagcagcgtatctcgattgatatatatataccctgtaaatctttaaagattatataaagatttaggcttttagctagtgttggcgtacaatgtattatactagtggtatccaactctgttgcctgtagatgatcgagctgctttctgtttgcctggaaatgttgatcgaaccgctttcgagacagtgcttttgtaaatttggggtgcatcataggcgcagaatcttttgttttatcgttgtctcgccgcacaatctcacttctctggtttgttattagttactgggtgtctgattggtt

SEQ ID NO: 5474 - DNA, 1051 bp, Zea mays
ctcgaggccggccgggccggggtcgggtgatgagttgcatagttcagatgatcaaccctcgtggttctgattacatttaagtaattacgcctccccgccggccggccgggccggaaccaatccataactcgaaaccttttcttgtgctctgtctgtgtgtttccaaagcaaacgaaagaggtcgaggatgtcttgcagctgcggatcaagctgcaactgcggatcaagctgcaactgcggcaagatgtaccctgacctggaggagaagagcggcgggggcgctcaggccagcgccgccgccgtcgtcctcggcgttgcccctgagacgaagaaggcggcgcagttcgaggcggcgggcgagtccggcgaggccgcccacggctgcagctgcggtgacagctgcaagtgcagcccctgcaactgctgatcctgctgcgttgtttcgtttgcggcatgcatggatgtcaccttttttttactgtctgctttgtgcttgtggcgtgtcaagaataaaggatggagccatcgtctggtctgactctggctctccgccatgcatgcttggtgtcggttctgttgtgcttgtgttggtgcatgtaatcgtatggcatcgttacacaccatgcatctctgatctctttgcgccagtgtgtgtgactatgtccctgtaacgattggctcagtgattgaatatatatacaatactgttttactaaaaaaaaaaaaaaaaaaggacccagggcccggcccccataaagccacccattcccgtaacttggccggttccacacccgttttcggcctgcttttaaaatgcccctaactccggggggggtccccaagcacattttttttgtgacaggtcctttttattaattaataaaagggccttattccaacgaacggtggttccagttttggacccggttccccccttggaaacttataaaaattcctccccccgaaaatggatcttttttttcgaccatgtgtttccccccgccccctccctgttcttcgctggtgggcgtataatttctcgttcccgtct

SEQ ID NO: 5475 - DNA, 1423 bp, Zea mays
  misc_feature (1)..(2): n is a, c, g, or t
  misc_feature (4)..(5): n is a, c, g, or t
  misc_feature (9)..(9): n is a, c, g, or t
  misc_feature (17)..(17): n is a, c, g, or t
  misc_feature (24)..(24): n is a, c, g, or t
  misc_feature (27)..(27): n is a, c, g, or t
  misc_feature (34)..(39): n is a, c, g, or t
  misc_feature (41)..(41): n is a, c, g, or t
  misc_feature (43)..(43): n is a, c, g, or t
  misc_feature (49)..(50): n is a, c, g, or t
  misc_feature (54)..(54): n is a, c, g, or t
  misc_feature (56)..(58): n is a, c, g, or t
  misc_feature (60)..(62): n is a, c, g, or t
nncnnctcnctataggnggaattnggnaccgggnnnnnncncnaggtcnncggnannnannntttttttgaatggttttagaaacaataacatccatactatatcacaactgtatgtatgtccactaaaacatcgcacagctcatctctagacaaactagtcatccaaaatcacatcaaggcatcacacacacatacacagcaggccaagatctctggcgagtgtcttggttgtcgctaaaatcattactgcgacagaacttaatttctatggcgaagatagagatgttacacaattatttaacaaagtcacaaattacaaggaagttaattaccatttcaccttcaatcgatggcaacatataagacacagcaaacaaaactatgcacattataggccacttgtggttagagcagattgcaacacatcttctaggtacttctctgcggctgcatactgcctctttttgtcctctatagctagtgcagctaaagctttatctggaggtaaatcctggtagctccttaatgtgtcagctatgggtttagtcttcctctcgagatccttcttatgctcagccatttccatcaacacaccatgattgatctctggcgtataacccactcgattaagcattgccttataatttgagacttggaggatatattgccgttccttggagtccatcataacaagctttgtttgccaatcagtcatttgctccacttgttgcttctccacatcattcttaaatttctccagcatcttcttcagctcagtaagcttgtttatggccttccgtgtgtagtcaagtagtgccttggactccttatgcactttgtccctcttctcctccacctctgctcgcctcagagacaagtctgcacttgccactacaaagctgctcatctcggtgtcacggatggcgaggaggttagcgactgcagcaacggctcgtgccgccgcggctgcaggtggtgggagtgcgtccctcgcgagccccgcccgctcgagagcctcccgcaaccgcgccgcctcggcgcggtactcggccgcctgcgcacgcagccccgcagccgcgattccggcagcgcgggaccgcccctgcgaagcagaggccagcgcgcggaggtaggccaccccgcgcggtgtggggtcgggacccagcgacagctccgccgccgcacctccgccaccgcctcgccctcccacatccgcggcgagggaggccagccacgcatttacctccgcgacggcagcagaggaggaggcggacgagggtgccggggcggtggggtcgaggtgctcggcggcgtgatccattggggcgagtggatggatcagtggggagaattttacacggaggagaggaaatcagaggttggtgtttaaatttcgtggcaatttattccccagggaaaat

SEQ ID NO: 5476 - DNA, 1734 bp, Zea mays
  misc_feature (6)..(9): n is a, c, g, or t
  misc_feature (1695)..(1695): n is a, c, g, or t
  misc_feature (1700)..(1700): n is a, c, g, or t
  misc_feature (1728)..(1728): n is a, c, g, or t
  misc_feature (1731)..(1731): n is a, c, g, or t
cggccnnnnctagatcgcaggccgcttttttttttttttttttcagtccaaaagatgacggttcctgtgatattgatattaaatgcaaaaatttagtcagctccagaattacactgattatcatgttacaaggtcattgcaacttccaggtctctcaactgggaaactagatggttaccgacacaatctcagagtagtagatttcaatattggggtaaaccctaaaccaaacaaaggcagtctaatcgctaaagatgtatcacgccacagcagcactcatttgctcaaatctcactaatgtactctaaaagagattcaacctcctgcctcagggcagcaattttctgctgctgcaaagcaatcctgttctctacatcttgcccgcgcagcttcttctcaaagctgtcgacaacggtggaatgccttgtcatgagcttctcctgcatctctctctcctttacgatcaagtcctctacctttggcaatatctgataagactggggagatgactgtagagtcgccaacagtggcttcagatctttcgatagctccttaaactgcgtgtcagcagctttacgagctgccttgcaagactgaatgtctcctgtcctagacaaatcccgcaatgaggcctccagtttatcatgaactgctaagcattgctcaaagataccctggattttctgaacagttgcttgcacctcatcccattgcagcttggccaagtaggaaggagagctcttggatattgacatatcagtacgcatgtaaacaatacaggccacaaacaggaggaagaaaccagtaatcagcatcaacggctctctgagcaaggatatgttgttgaatctgtagtaaacctggaaatacaaattatgctctggaataacatcaggtttctccaagacaacaactggtcttccgacaatgtcaaggtgtgaatacttaacctcttgctgctgctgtgttggaaagggagctgaaacttcgatatcctttgacccttcaggtagaacaacctttacgataagcttttcaatgagaatttcctccaatggagaaccaaatgtgatattgagaaatctctttccatcagaatagaaaacaaagtcttcaagtggtaaaccataaccaacagtgaaggttgtttgccacccaccaaacaatggaaaccttggttctatttccagttgggtcttcatagaatcactccacaaatgtgatgtggaaatattaccaatctcatctcggtaataaatagagtgtgcccttggaggcagttttgcaataagatgtctaaaagatgaaacaccccttacgtaaggtctagattgataatcaatcctggaaaattcacccttgagtctggcaccaccatgagcaatgttgtagtgttccgtaatctgtacatttccccagtgagatatctcaatctcccttataacttcctttgcaactgcaaaaggattgttgttctcaaaatgcacaatcacaggtaagtaggagaacgggggaaggtcatgaaatggtccatatttcagttctgaatccacaagttttgcgtttggatgccttgtgtatgattcaacccttccaccaggcaatctgatagcaagtgtctgagccccggccggcctcggggtcccctagggagcactatcctgatagacaacaagttgtgcttcggcttgagtnatttnttctgggaatggttgaagagagtgtgtnacncgg

SEQ ID NO: 5477 - DNA, 1776 bp, Zea mays
ccggccgggatcattgggtacctcgacgccgggcgggactctaaatctctcccgtgcggcagtccacatggccgcaccgcctagacacgggtcgcgcgcaataacccaccgatcgagctgagcacgcacgacctggcgctcgctttaaactctcgctctcaatcgtcgtcgcctcgggctctcggcagacagctgcggcggcgtgcctggcagtgaagcggtagcaggtagagccagccagtctagcttagccaccacactagtgtgatggcgaccaccggcggcggcaaggcggcactggtgctggggcggcttctgcttctgctgtgcgtgctcggccatggagctgcgcagcggtacaacgccatctggagcttcggcgactccatctccgacaccggcaacctctgcgtggggggcgggtgcccttcctggctcaccacggggcagccgccctacggggagaccttcttcggccgccccaccggacgctgctccgacggccgcgtcatcgtcgacttcctggccgagcactttgggctgcccctgctgccggcttcgaaagccggcggcgacttgaagaagggggcgaacatggcgatcatcggcgccaccaccatggactttgacttcttcaagtccatcggcctcagcgacaagatctggaacaacgggccgctggacacccaaatccagtggttcaggcagctgctcccctccgtgtgcgggaaggattgcaagaactacctgtccaagtccctgttcgtggtgggcgagttcggcggcaacgactacaacgcggcgctcttctcggggcggtccatggcggaggtgagagggtacgtgcccatggtggtgagcaagctcgtccgcggcctggaggcgatcgtgaggagcggagccgtggacgtggtggtgcccggggtgctccccatcggctgcttccccatctacctcaccctctacggcacctccaacgccgccgactacgaccgcgacggctgcctccgcggctacaacggcctctcctcctaccacaacgcgctgctgcggcggagcctgtccggcctgcggaggacgtacccgcacgcccggatcatgtacgccgacttctacacccaggtcacccacatgatccgggcccctcacaacttcgggctcaagtacggcctcaaggtctgctgcggcgccggcgggcagggccagtacggctacaacaacaaggcgcggtgcggcatggccggggccagcgcctgcgccgacccgggcaactacctcatctgggacggcatccacctcaccgaggcggcctaccgctccattgccgacggctggctcaagggcccctactgcagccctcccatccagcactgatcgagctagctgggccgggggactgaatagctaattaagctagcagcatattattcatgagtgacatcatcgtgctttgtttgtttacggctaattgccatgtgcatcatcctagcgctctagcaggttcatcaatgatgggtttgctatttggtttgtcaattagttgttcaattggtgaggaaggggtagctggtgtttcggcggtgtggtgggaacagtgatgaataaacgtgtaatggactgtttacaattagctacgacgtacgtgaacaataagctcatatcacagcaaacaacaatatatgacgggaaggagcacaaaaaaaaaaaaaaaaaaaaaaaaaaaaaaaaaaaaaaaaaaaggggggcaaaaaaaaaaaaataaaaaaaaaaaaaaaa

SEQ ID NO: 5478 - DNA, 1527 bp, Zea mays
ggtacctcgccggccgggccgatgacgtcgctactcttccgggatggaccaataacattttatatctggacgccccttatcgccctcgttatttacatcgctgccaccctcctctccgccgtcgccgccgccgccggggatggggggagcgcaattccccggcgacaacgacgtcgcggaagtagacgcggcccgcgacggagaggtggaccgccgtgacgtgggcaagatgaagcacgggtgcgagcattaccggcggaggtgcaagatcgtggcaccgtgctgcaaccaggtgttcccctgccgccactgccacaacgaggctacggcttccggagatcggcatacaatatgtcgtcaggatgttgaaaaagtagtttgcctactctgtgaaacaaaacagccggtgtcacaagtgtgcataagctgtggagtcaatatgggagagtacttttgtgatatatgcaaattttatgatgatgatacagacaaagggcagtaccattgcatcgattgtggcatatgcagggttggtggcaaggaaaacttcttccactgtgtgaagtgtgggtcctgctattctgttatactccgtgataaccatcagtgtgtggagaactcaatgaggcagaattgcccaatctgttatgagtatctatttgactcattacaaggaacaagagttctgaactgtggacacacaatgcacttgacatgttttgaagaaatggtggcgcataacaaatacacttgtccaatatgctctaaaacagctcttgatttgacacatcattgggaaatgttggatcaagagatcgaagccacgatcatgcctcttgtgtatcgctacaagatttgggtgctttgcaacgattgcaacaaggtctcagaggtgaactttcacgtgattggccacaagtgcagccactgcagatcgtacaacacccgaacaacatcgcgccctgcagatttatccggaagcagctcaccttcaacagactcatccgacaacaacatatagagaagaaaccattgacagagccaatatgattgaagaaccggaggaggaaacattgtttcggggcgtgcgtgcttgccaaacttgaagactcccagccgtttattggccctcatcttgtctagattcagttcattccatgagtctttgctgttctggcaacttccagcttgcgcatcgctgggtcaacaacccacatggccggcgtagctgtccctttgaatcttgttcgcagccgtgattttatcactgtggatgaaacgtaatcacatacttactgtaatctactatggttgaagatgtgtgcccccctgactcatgccttgtgtgcttgtgctgaactgtttatgaattcccatgctgttccgtaacactatattgccatttgtgtttccttatctgtcaagtaccgccaagtgtgcggtgaaattgtaattatttgcaatgaatagaatcttatatctatacctaataataaagactcaacatttctaccaagttacccacac

SEQ ID NO: 5479 - DNA, 2339 bp, Zea mays
cttccccgttctgtcctcgcggtcgcgcaggcgtaccaaacagctagggccgggggccgcagccgcgcgctcccccggcgccggccggcgccgccgagatggtgcgcctcctctatctccggaccccgccgcggccgttgctcccgcagttcgctgtacatacacagcggccacaaagtctgctcagagtttccccccgcttccgccctcccatccgtcttcggtgccgcgcgctcgacgccagtagaccggttgcggtggagggggagcgggatgaggaggacggtctcgaggacgaggaggagtcctacttctcggtcacctcgtcggggctctcggaggtggactacctaggggaaagcaccaggggggatttgaacgtgaggagggagcgcctcgaggcgcttgggaacagcaagtcaactttgcatggtcctattgaggagatagcttggaaagaagcgggagaagctgaaacattgcttcatgacttgggaattgcagacccgttttcagtaagacactctcctcgtggaattttctgcaccaggacactaaatcttcgatctatcagtgtagttggctacgatatggattatacattaattcattacaatgtgatggcctgggaaggacgtgcatatgactatgggatggacaacctcaagagcatgggttttccagtagatgaccttaaatttgaccctgacctggtcataagaggtcttgttattgataaagagaagggaaacttggttaaagctgatcgatttgggtacattaagagggccatgcatggtacccaaatgctttccactcgtgctgtgagtgaaatatatggaagagaattggtggacctgcggaaagaaattcgatgggagttccttaatacccttttctctgtttcagaagctgtcatgttcatgcagatggttgacaagttagatcagggattggtgccagctgaacttgggccactggattacaaaggactgtacaatgctgtttccaaagcactttttcgagcacatgtagaaggccaacttaagagagaaataatggctgagcctgatcggtttgtagagcctgatccagaacttcctttagctcttcttgatcaaaaagaggctggaaaaaagttgcttctcattactaattcagatttccattatacaaacaaaatgatgaatcatgcattcaatcgctttcttcctaatgatgtgggatggagagatctgtttgaaatggttatagtctctgcaaggaagccagaattttttcagctttcacatccattgtatgaggttgtaacagatgatggactgatgcgtccctgttttaaagtaaattcaggtggcttatattctggtggtagtgctcagatggttgagaaatcactagacattcatggggatgagatattatatgttggggaccatatttacacagatgtaagccagtcaaaagttcatttacgatggaggacggcattaatctgcagagaactagaagatgagtttaatgcactggtcaaaagccatgatcagaaagaaaagcttgttacacttatacaacaaaaagaaattgtgggggatcttttcaaccagcttcgcctggctctgcagaggcgctctaattcacgtcctgcacagacgcttgctgcaacttgtatggatgaccaggagcttacggagagtatgcaaaagttgctcattgttatgcaaagattagatgaaaagatcgggccaatgctagaagcagatggagaacttttcaataaaagatggggttggttgtcacgtgctggcctatgggataagagtcatcttaccaggcaaattgaaaaatatgctgatatatacacatcaagggtttcaaattttctgcactatactccattcatgtatttccaatctcaagaacagacacttgcgcatgatgcccattcctattctggaggaaaggacatcaaagttcattgagcatccgttcgtcacaatctggagattaggcaggaaagagcgaacgtgatcattgtgattatggctgggatggctagacaacaacaattgtcgttttgaacaaattaattaatacaccttgtaagattgtatttatatataagtaaatctttagctatagcatgctgaatgattgttctgatagtcagtttgtttgtcgtggcctacctagagtttcatattgggaggcacagtacctgttttggtgtacctgctgctatttgcattgtatatgtgaaatgcgaagtgaagtatgacaaggtaacgataagtgacaaatcacgtcatttgatcctgcgcaaaacgatattaaaaaaa

SEQ ID NO: 5480 - DNA, 1351 bp, Zea mays
ccggccgggaccacggccacggagcgtcgcacgattcgcggccccgcccgcgccggccccggctccctccttctccgctgggtcactcgctcgtcgctcccaagtcccaccaagctgtcccccgaccactccgccgcccgctccaatggcggcgccggccagctcctcatgcttccacccacgcgcgaccgccagcccgccgtcttctctcagcgtcggcaccaaggtcttcgtcgggctcagggcgcagaccaagctcggttcgtcggagtcgtcatgcccgaatgtcagcgctgggttccacactgcggtcaaccggagaatctctctcaggttgtccaaaaagaaggcgaccagagcccgcatctcgatgatgcctattggtactccacgtgtgccttaccgaacacctggtgaaggaacctggcaatggcttgacatatggaacgctctgtaccgtgagcggattatcttcattggggacaatatagatgaagaattcagcaaccaagtgttggcaagcatgctctatcttgacagcattgataattccaaaaagataatgctatacattaatggaccaggaggagatcttactccgtgtatggcactatatgataccatgctaagtctaaaaagtcctattggcactcactgcttgggctttgcattcaacctggcaggattcatccttgcagccggtgaaaagggttcacgcactggtatgcctctatgccggatttcactccaatcacctgccggagcagctcgaggacaggctgacgatatagaaaacgaagcaaacgagcttatccgcatcaagaactatctctatggcaagctcgcggggcacacaggccattctgtcgagaagatccatgaggacctgtctagggtgaagcgcttcgacgccgaaggggctctcgagtacgggatcatcgaccgtattgtcaggccgtctaggatcaagaaagagggctccactgctcaaaggagggacatgcggaatctgggacttggctaataatagacgatcgaaatcctgttgtatcagaattttttgtgcaagggatgcgcttattatgggagagcgagcgatgcactgttccaggctctacgccggcgtaggtgttttgttgtgtcagctgtgcttttgctaactgtcagcactactattataatatatttgctgggattgttgatgagcacggcaaagaaaaagaccagagatgcgagggcactggcctctaggcgtctcgtctcttggacaactcttgtaccaatcaatcaaccaggtgcccatgctctggatggggactacagttatatgcagggctaaaaaaaaaaaaaa

SEQ ID NO: 5481 - DNA, 1796 bp, Zea mays
cccacgcgtccgtctctctctctctctctctaatttcccactacctgctcctgcttgttgcttgtgcggtgtgcgctgcgcgcggcaggggggtgaaggggatgaaggaggagatgatggtcggcctgtcggcgccggggccggtggggaggtggggcgccgcgccgccgcaggcgatgctggagaggatgaaggactacggccaggagggcgccttcgcgctctgggacgatctctcgcccgaggaccgggagctcctcgtccgggacatcgagagtctagacctctcaaggatcgatcggatcatccggcgctcccttggatcacaaggcatcccattgcctgctgtcgagcccgtgccggaatctagtgtctccaaggtggaggacaggtctgcagaggacaaagaaagatggtggaagaaggggttgaaagccatctcggaggggaagctggccgttgtccttttggccggtggtcagggtactcgactgggaagctcagatcctaagggatgtttcaatatcggacttccatcaggaaagtcacttttccagctccaagctgaaaggattctgtgcgttcaaaagctggctgctcaatctagcgaaagcccgagtaacactgtgccgatccactggtacataatgacaagcccctttacagatgctgccaccgccaaattctttgaaacccgtagatattttggcttagaccctgaccaagtgacatttttccaacaaggcacacttccatgcgtttctgccgatggtagatttattatggagacagcatatagggtagcaaaggctcctgatggcaacggtggagtttatgctgcactgaagtccaagaagttgatggaagatatggccgcgcggggtgtgaaatacgtagattgctacggagttgacaacgcgctggttcgagttgcagatcctacgttcttagggtacttcattgacatgggggcatcttctgccgccaaagtggttaggaaggcttatccgcaagagaacgttggggtgttcgttcaacgaggccgtgggggaccgctctcggtggttgagtacagcgaaatggattcggctatggctaccgaaatgaatcagtcgacagggcgactccgttactgttggagcaacatctgcctgcacatgttcactctggacttcttgaaccaagtggcaaacagccttgagaaggacagtgtataccatctagctgagaagaagatcccttccatccatgggttcacgacgggcctgaagcttgaacagtttatattcgacgccttcacatactccccgtccacggcacttttcgaggtcatgcgggaggaggaattcgcgccggtaaagaacgccagcggcgcaacgtatgacacccctgatagcgcgaagctcatgctgctccgcctccacagcagatgggtagtcgctgctggcggcttcttgacgcactctgtgcccttgtatatgacaggcgtcgaagtttctccgctctcctcctacgccggagagaacctggaagccatctgccgtgggcgaacgttccatgcgccgagcgagatctcgttttaggaggtagacctgttcatgggactggagtagcagttgtgtcatctgtaaaacgagcgtaaaggatgggcaggctgttgtgtactgcgtgttgtagatgtaacatctcggacggacacaaaattcatctcgagttttctctccaaaaaaaaaaaaaaaaaaaaaaaaaaaaaaaaaaaaaaaaaaaaaaaaaaaaaaggaaaaaaaaaaaaaaaa

SEQ ID NO: 5482 - DNA, 2662 bp, Zea mays
gtgatgcaattgaaggaacaactatgtttgccagtaaaaggtattggggaggagaagaaggggacacaatgttccgctggatacgcccaattccggtgggaaccgaggaggggggggggggagcaacaagttcatcatacacctgtgaaatgcaatgacattggcttctacatatctgtcttgtgcaagcctgttagaaatgatggagttgatggttctttagtgtcgactgaagcgattggtcctattataccagggccaccggcgtggcaatctcttgaactagctggctctatggttgaaggtggccgtttgacctttcatgctgtgtatacaggaggtttgcggggaagttgcatccaagaatgggtcagattacatgatgatgggcacaaggacaagttgactgctgatgaatgtctagaccttgatctagctgatatcgattgccggattgaacttatgtatacacctgtacgagaagacggagtgcacgggttaccaaggagtgttacttctgatacaatcttacctggggagcccaagggtgtcaatcttattctacctgagtgttttgaggacaatgaaatttctcccatcaaaacctatttcggtggcaaggaaggcactggcaaatatacatggtttcgaaataaagagaaacttgataacttggaatttgatctggttgctgaatcatcagaagttgttggagaaaccttaaaatataagccttcattgaatgatgttagttcctatctgattctttattgggttcctacacggcgtgatggaaaggttggtgatcctttgatggctatctctgatgatccggtcatggcagcttttccatctgtttcggatgttcacttagagcagaaaagttcagatgtatattgtggactaggcatctattatggtggatatgagggattaagcttgtatagatggtacagggaatctagtgatggaactaggcttcacatagatggtgctgattcagtcacatacgaagtgacagatgctgattacagctgccgtctactgtttggttatactcctgttcgttcagatgggataagtggagaagaaaaactctctgaaccatctgatgtaattttgccagaactactcaaaatcgagacactcaatttcaaggggaatcaggttgaaagagaaacactgactgctgctgaacaaattccgtacagtgagattcaacaacatatatggaaaaattataagaaagagatgaaatatcaatggtttatttccaatgaatcaggaggcgatcagtcttttgaaccattggcaacccagtgttctcgctcatacaaagtgcgctttgaggatattggtcgttgcctgaaatgcgaatgctttgtcactgatgtatttggacgatctagtgaattggtatccgctgtgactgctcctattttgccaggaaggcctaaaattgaaaagctggagattgaaggaagaggtttccacactgacctatatgccgttcagggtacctatagcggaggcaaagaaggcaagagtaaaatacaatggctcagatcgatggttggaagccctgatcttatctccatacctggcgaaactggaagaacgtatgaagctaatgttgatgatgtagggtataggcttgttgcaatttatacacctgtaagagaggatggagttgagggacaacctgtttctgtttcaacagaacagattgcagttgagcctgaactttacagggaagtgaaacagaagctcgatgatggttcagtcaaatttgaggttctgtgtgacaaggaccgaacacccaaaaaggcacaagtaatgggccatttggagcggagggttttggaagtcaaccgaaagaggataaaagtagtaaagcctggatctaagacatcattcccgagtactgaagtacgaggaacctacgctccaccgttccatgtcgagctgtatcgcaatgaccagcaccgcttcaagattgttgtcgacggtgatactgaagttgacttaatggtgcaaacacgacacatgcgagaccgcatcatcctcacgatcagaggcctcgcccagaagttcaacagcacctccctcaacacacttctcaggatcgaggcatgatttgatgggtaggatgcccacatgatagacctgacaagtgtaaaaaccaactattacgggaagctgttccccttgttccgattggttagagtgcgtggttttagtaggattcgtgacatgccagccttttgtgtgtatgggtgtgggacgggccgagcgtgttggattacagtttttttccctgacacatctctcaaatcagagcagcatcagctggttgctctgactcgtgccgtcgtgcgtcatgaaatgtacatagggtcgttagagcgagaaagagagtggtgtttcttggtgctgtatttattatgcactggttgggttgggttttttcgactgccattctcatactaagtattggttctttcttttttcggtcgttgggtttgcatatacttgtaccgacaacacagcttcggggtgattgggcgagtcctgttccgttcagaatgcctggtccacatttgtgtatgctgttttacggtcgcaaatgtaaattcacctgcccataaaacgagaatcaaaa

SEQ ID NO: 5483 - DNA, 2516 bp, Zea mays
ggccggggcccccggaccctattaaaccattgggtacctcgaggccggccgggccgccgtcgtcgtctagctcccatccgacctcctgcattccccactagtcccaactcccaaccaccgccagccgtccgctctccgcaagcgcgaccttccggccagatccgccccgtcgcgccgacgagcggtccttctgcctagtttctccgcccagcgagcggcgggttcctcggagattcccgctggccgcggggatccatttgtgactgctcgcgttgcgcctggatctggtttgggacggaggagtgaaacgcgacggtgatcgtgcgaggtgggacgccatcagtgctctgtctggggttcggtctgttcttcggctgcagatctggaagggtttcgtgggatccgtcgctacgatctgtcccagtcagagcacctgcatcatctcgggtcgggccatggagactctgctcatctcggaggagcgcaaccaccagctccaccacttctcgggtcgccggaagaaggcgttagcagcgtcgcctcagtccacgcgcagctaccatgcgggcaactgccgggcgttccactccggcatcaccgtcggcatcctgccgtccccgcccgcgcagagggttgcactgacccgctcctctcctgagcccaagacaccgaaacatcagcttcaccatgggaaaaagcgcagccgagcaatctctataaacctttcgacgtcccctccctctcgccctgagctctgggctggcccggggttctgcaattcgccgcctcccagctccctcccgatccccaagttctcactccaccagaagcgcagtgtctcacttgaatttccacctgctgaccggtcagacgacgaagaggtgcccgtgcatgccaagtcggcaccttcatcgccgactgcaggctcaggtgttaccttcttcagtggtactgatgctaccattgccaccgagaatctgaggaggatccttaacctcaaaattgaggataactgaatggcggttgggtagttctgtgtacatagtttaactacaactgacctttgtagtatgtatagggtaaccggggataaccactgtgtacctggcggtggttccttctgcagcagtactgtaggcggttagcaagcacagcgaggagtttaggaagtttggaaatgcagtgagaaggatgttgtggtaatggagatttggtggatttgcatatcactgcagtttcagagtcacctttgttccttgtaccttgtagttgcctattagtagtccaatactccatttagatgttatagtatttgcatcttccctgcccatcattaaccagtagccacagccttcatatcataatccttgtcatgtagttcatctcaggcagggcattgtaggctagctagtactgttcaagttctgtcatatatgtagtcttctgtaggattgctgcatcccttgaaacttgcattctgtatcacattgcatcctgctgactcacctcccttcataacatctccctgtgttatgcaaagcgcacaaggatctcccctctggcacttctgttttttggaatgaagatgctcagaggagttgttatgaagtcccgatccaatgttctttgtcctccatgtctgtactgactttagctatgcatctcctttgtcaccccagtcccattgcatgtgccatccaatccgtttcgaaccattcatctcaaaattgcatttagtggtggttttcccttcgtcttattatcttttgtgcctcatgatcctggagcatgcccaggattctagtctcctccatgtattctcataaaggacttcacgtatcagagatctgcgaatgctcaaccctgaatatggtttgcttgtccgatgccacttcgcctcatccatacctggagttcagaattggcgaagcacctatcacttagctatctgtttcatagtcagtattgtgtcagactgttgtttttgtgcaatatttgattggctactagtctgtttgtgttactgttcaagtttatggtactgatcatatatggcggccggagtgttccacgccgatgctgtggcattctgttgctttcaagtaaaactagtcaatgttatgtaccttcatgttattttttggtcctgtttctgtgacatgtttgaagttccatgttatcgcactgtatttgctcccaagatcttttttgtttggtccgcttttctagtggtcctaatcatcgtgtgacaaatggttgttactatacttaagggtctcctttttaaggataaatatcaacgttccgaattgcgatgcttggtggcccctgcatactttgtgcggggaagatggctatggttggtacttgttgagatgattgtggagcctgtttgagaacctgtagttgattagtgttgtggagataaaaataccaatatgcttgtcagtaactcaacatctgttgctttgttcttttcactgaaaggggctgcagttgattcctcctgtgccgac

SEQ ID NO: 5484 - DNA, 1816 bp, Zea mays
  misc_feature (1806)..(1806): n is a, c, g, or t
ttttttgttttttttttttttttttgtggactagtggcagcagtaatattatatcttaactgattgagttaagcacaagctgaaacatcacatccagatactacctactaaaaggacagaggggaaacagggctgtgcaaatgccatcaatcaggaaggtgatggccagagaaccattatactgaaagcttctgtggctcatggctagcagaactgaattggcatgcataagcagtggcgtacagacggttagattcggccatgtcactctcctcgccttccactcctaaaaactgagacgtctttccactcgaacagctcctttcagacagcaacttctcttcggataaagccttctcgagcctctcctcaaatggcgttgcatgccaactcaccttttggtcttctttgtacttatttgttgaattgggaatgccatttccatcccgcaatttagaggtaaaatttgctggcagtggcaccttatctttccaatgtgctgcaaccattccaataataggcctatcctcatctgaactcttacccgaatgagacctgtctcctgccatggcctcatctctgaatgtcttcttaggatttgggggcttcaaccattgggctaagcttgggagctccagttctgaattatcgctcttcggtaacttctttctggtggcatggatagttgcctcagttttcggggacttctccacagatgttgtgttcatgctctctcttatcttgtaagaagatggtacagaaccctcagagctctggaaaagggagcattcatcagatattgaaatttccatggagaccacatggtgattctttgcgcactttggttcctctgttttttcagggtgaaaggattcttcttttgagaccccacattcttcaagatccagagcttggtgttgctcttcatcctgcacaagtgcctccatgttgttctcattcatcgaatctttcacattatttgcaagggaagtagcggaagtctgcaactcatcgtttgtttttgaagaactcgttgcatctggaacagtgaaactctgatgagaccttgaaggagtttcacatttctcaaccttcggcgcttccatgaaatgtagatcatcagacacaacaggaagacatcctgaatgtgtttccttctgatgaactgaatcagcatatttgatgagcgctccttgaatgttatttgtagtttgcagcaacgcaccacagcttctttggataatggcctgatgcacaagctcctgatccatctccttcctctcgccactctcgtccgcccacgagctcgccacttgcgccgtccttgatccctcatcttctcgctggaacacggcggagagcgcgttcctcgacggcggcctggccctcctgcccgcgccatcctggacctggtggctggtcgtcgtcgtcgtcgcggggggctgggacggatgcgcgagctggccgccggtgcccttcacctcgccatcgccgccggacgcgcggaagcaggcgaagaggcaccccatcatcccccctcctcctctgccgccgccgccgcgcggcgtggatttcgcccgctttgaggaagagctgggccgtacctcgtggcagcaggagagaggactgaggaggaggttttaggggaagagtaggtgggaggggtttgaaatttaaaatggggaggagagacgaggcggggccggaggcggaggcggaggccgagggaaggagagaagagaaagtcacggcggagtcagtggagcgctccgggaagtgggagtgtgggtgggagactggggactnctgggaggcc

SEQ ID NO: 5485 - DNA, 787 bp, Zea mays
actcctaccgcgcgcctggggtacctcgagccggccgggggaagcccaccatttggtttggttgtttgtttggtggacgccttgcttttcacttcaccggaaaccaaaatggcagccagcaggatccctccttgccatcttcacccttcttcttcttcctcctcctcctcctccatggccacgatctgcccaaggccaggcacaaggcagtcgtcggccttcaggttcagggcctctgctcatgggagcggttcctcaccacacctctcctccttcactgctgtgacaggcaagaaggttaaggtgttcgaggaccagctgagagggatcgtgtgctacagagacgaggacggggagatggtctgcgaggggtacgacgaaggccccaggctcggaatgcggctgccggagaaggcctccttcccatggcctgtgggggttcggatcacggacttcatccagctggcgacgctccaggtcttcgacgacgacgtcgatgttcttcagctcacgggtgaccagaactaaagcatgtaagcatagtggtgtcgtagtacagtacagtgatgggtatatgcaagaataatgcgtggtgttgctcttatttgctcaggcttacttgtttgtacataatcacttactgcaaggatgagattgttgtttaaagcacaacctttatgtatgcatatatatactatatgaattgagaaaattgagatctgaatacaaggataaaaacgcttgtactcaaaaaaaaaaaaagaaaaaaaaaaaaaaaagcgccccc

SEQ ID NO: 5486 - DNA, 1719 bp, Zea mays
cccactcgttcgggtcaggcgcctgaatcgtccacaatgagccacgagatcgactacacgattaaggcccagggtgccgaaacaaactgttgagagtgagaaggccgaggccgacgtgccacgctcggatctcacaactagtcacaagctgcttctccatattccacaatccacacatccggaccgagcgcgaccccacctcccagatctcatctgcgacgacctcctccctcccgatcccgctccgtctccccccaccgccaccgctgccgctgccgcctcccccaccgaggtcttgtcttcggcgatccagccggagcccgcggcggcgacgatgtacgggtgggagatgctgtcgttcaacatacacgatgggttcctggaggccatcgtgcggggcaaccgctcgggcctcctcaccgccgccgactacaacaacctctgccagtgcgagaccctcgacgacatcaagatgcacctcaccgccaccgagtacgggccctacctccagaacgaaccttcacccttgcacacaacgacaattgtggagaagtgcactcttaaactagtcgatgagtacaagcacatgctgtgccaggccactgaaccactatctacgtttttgcagtatataacttatggccacatgattgacaatgttgtccttattgtaactgggacactgcatgagagagatgttaacgaacttttggagaaatgccacccattgggcatgtttgacagcattgcatcacttgctgttgctcaaaacatgcgtgagctttatagattggttctagtcgatacaccactggccccttacttctcagagtgcattacatctgaggatttggatgacatgaatattgagattatgaggaacactctctacaaagcatatcttgaggacttctacaaattttgccagaaactaggtggtgcaacagctgagatcatgtgtgatctcctttcatttgaagctgacagaagagctgttaacattacaataaatagtattggtactgagttgacaagagatgaccgcaggaagctgtactccaactttggtttattgtatccatatggccacgaagaattggccgtttgtgaagatgttgaccaggttcgtggtgcaatggagaagtacccaccataccagtctatattttccaggatttcatatggagaaagtcagatgttggataaggcattttatgaggaggaagtcaagaggctatgcttgtcctttgagcagcagttccactacgctgttttcttcgcttacatcaggctccgcgagcaggagatcaggaacctgatgtggatctctgaatgtgtcgctcagaaccagaagtcccgggtccatgacagtgtcgtcttcatattctgagaacccccgccactatatatgtatgtacaaaatgcctgctttgatgatggcacaatcgctcgacaattataaatctgggacttattattattcccattccctctgttagacgccggcgtaaaaaatgccagacctggagttgatgtattatttgttttgtagtcaaataaaggtgtgattatctggcacacaaaataaaatcttgtgtattttggaacagaccttcatcgtcaatgcacagtatgctgtcaatgcacaatatgtgtgtgcaaaagcaaaatagatatatcatgcacacatgtagggggagatatctcttaaaaaaaaaa

SEQ ID NO: 5487 - DNA, 1682 bp, Zea mays
aagtctgtccaccttccgcgtagactcggatcccacctagtcaatggagtgagcaacgagggttgggttcggcagcagcgagggaaaagccaaagccccccagggcagcaggaagcaatagaagcgagcgaggcagcggcgtggggcgaggagtggaggacaccgatccccgccggagagcgcgtccatcccaaatggcgactgcagcttcgcccgccgctgcctttccccacatcctctccctctcctcctaatcccctcccaatccccccctctctctctcttcctcgccagctggttcgttccgcacccgccgccgcattgggtgccgaggagggacgcaatggagcagtacgagaaggtggagaagatcggggagggcacgtacggggtggtgtacaaggcgctggacaaggccaccaacgagacgatcgcgctcaagaagatccgcctcgagcaggaggacgagggcgtcccgtccaccgccatccgcgagatctctctcctcaaggagatgaaccacggcaacatcgtcaggttacatgatgttgtccacagcgagaagcggatatacctcgtcttcgagtacctggatctggacctcaagaagttcatggactcttgcccggagtttgctaagaatcccactttgattaagtcatacctctaccagatactccgtggcgttgcgtactgccattctcatagagttcttcaccgagatttgaaacctcagaacttgttgatagatcggcgtaataatgcactgaagcttgcagactttggtttagccagggcatttggaattcctgtccgtacatttactcatgaggtagtgacattatggtacagagctccagaaatccttcttggagcgagacagtattccacaccagttgacgtatggtctgtgggctgtatctttgcggaaatggtgaaccaaaagccactattccctggtgattctgagatcgacgaactgttcaagatattcagggtgctaggtacaccgaatgaacaaagttggcctggagtcagttgtttgcctgacttcaagactgctttccccaggtggcaagctcaggacctggcaacaatagtcccaaatctagaacctgctggcttggaccttctctctaaaatgcttcggtatgagccaagcaaaagaatcacagctaggcaagcacttgagcacgagtacttcaaggaccttgagatggtacagtgacctgctaaatgtgcttcgcgttgctttggcatttgtaattgtctgagctgagtcgctcattcctttttatgggcgtctgtactctctcattctctctgcatttttgtcgttcagctggatattttgaatctggtgtgttttgagatgtattaaggaatatcaaatagattaccgccttggtctctatttactgaaagtaaatatcctccatgtttatttcccccgaagcagaaaaaaaaaaaaaaaaaaaaaaaaaaaaaaaaaaaaaaaaaaaaaaaaaaaaaaaaaaaaaaaaaaaaaaaaaaaaaaaaaaaaaaaaaaaaaataaaaaaaaaaaaaaaaggggggcccgctttaagggaccaaattttacgtccccgggaatgcaaggtaatagttttttttttgggcccccaaatttaatttaatgggcggggttttaaaaacgggggga

SEQ ID NO: 5488 - DNA, 2403 bp, Zea mays
atatatataaaaaaaaagatataaaatatattaaaaatataaaaaaagaaataataaaaaaaataaaaaaataaaaaataaaaaaaaaattataataataaataaaaaaaaaaaaaaaaaaaaataaaaaacccataaaaaaaataagaaaaaatataaaatataaaatatattatataatttaaaatatattaaattaattataataattaatattaaaataattttataattatttgagctcacttgttttttttttttttttttaatcgtcattgatgaaatttattatttcaaaacgctagagtacgaaaaagttctgcttacatattatgacttataaaggctgacaattcgggatgtttaagaacatccatcccttgctgaagtttacaggatttgatgcaataatgttacagtagcacagcactagtagctctgtctgtattgtttattatgtaataatgttacaatggaaatacatgtttgatggattcaaaatctctttggccactcaagagtgtaaaccatggatgtagctagaccagtgatcgatctcatcagttctttggtgcattagcacatctgcttggtaattggggttgagtaagttggcagatcaaccattgttcagtgctgctgctagaattgggtttttctccaaggcaagtagtctccgccgaggtcactgctagaatctagtccgctgcacctgagagctgctgcacatgcaacgttatggcttccggacagggggactgggctcgcagaagttcgaggcggttaaatggatgtacaaattgaagaacatagtcttcattctctttgacagtcccatacaaccaacataagacttcatcggcaaaggcaaggcaaacgccaccctgccagtagttctttgccttcaccttttgtgtaatatctttggttcttagtctttccgtccgtacaagtatgccagcatcattcctgaatcccacaacaacataaggaacaccggcaagaaacgattgaatccaaaatctaagtagcttttctttttcatatgcttccactgtatgatattccagctctctgcttgttttcagctccacatagaacctcctgccatcatcagttgcatcacagcagtccatctcagcacccatgacaatccgatgggcacccaattttgtctttattacagaacaaaactctacatttgcatcgataccccttccatcgtcgctgaatgagttctcagtggcaaggttttcaaaagaatagccccaataacatctcttacgctcaacttcactttttggtctttcagggagcttatgaacatcaagatatacaacaccccttcttttatgaacgcccatcttccatggttctcttaggtaagcagtggccaatatcttattaagattgttgcggtatgtcacaaaatgtatagtattctgaagaagtatgttggaatttcgtatgcatgcgagtagatcgccaaatccttcagaacccaaatctctcttctctatatatgactcgaatcctttattgagatctgcaccgcggtattcacagatttcacgtttgaagagcctcaagctgcgatcatcaaaatacacctttccaccctcaacacggcttaagcatgcaatctcacaaggctcctgaaaagtaacagcttttctagacaatgtttcttcgctcttattaagcttcatatctgaaactaaaccttcaacatgacgcccattcccgaatctcccgtaaccaaagttatgtcgccctggatggcctcctggccttggaagaagtggtgggcctctaccacctcgtcctccaaagcctcctcgagaatgattattagtgttccgaattggaggaagcactgggactaggtagtggctgcgcgccggagttctgacgtactcttcgttatctgagccgaacaaatctctctcctcctctacctcctggttctcatattccctcctctcatcgtccagatagccggcggcgccggcgctccttgtggctatgaggttggacgaatcgtattcctccccgtcccccacatcggcgccatcctcgccctcaccggcagcgccgccgctgctgctgaggcttgagccgccacttgaggatgaggaggacgcggcggcagaggacgacgaggacgatgatggggaggaggagcccgacgagtccccgccgccgtcggcctcggcctcggcctcggcgccgccgtcgtggacgtcgtagtcctcgccgaagacgttgacgtcctgttccgagaagtccatggcgggcgcggcgggggcggtgagccggcgaggcctggtcgggaaacgaaacggagaagagggtttcggtcgggtccgacacgacacggaacaaaagaaacctcccggccgg

SEQ ID NO: 5489 - DNA, 4930 bp, Zea mays
  misc_feature (3956)..(3956): n is a, c, g, or t
agctcggaattcggctcgaggaaatttcgcgaatctgcaaaagtagatgccaggcactgggagcagataaatgagcggcggtataatcttgatttggttcgtgatgtgatgtctacagagctaagagcaattcgtcaagacaaatacggttggatattgcacggagaaagtgagtggcaaagccagctccaagaacttgtccatgagagaggtatttttcctatgcggcaaccatccacagaacctgagtggcagctgtgtggtgttgaaggaccatatagaatgaggaagaaacttgagcactccaaatttaagatagatactattcagaatgttctaaccagcaaccttggatcaaatggtggtaagattatcaataaagaggatggagaattgttgttgacatctgggtcagacacaatgtcaggcttgaatcttttgacctatgacactgagcagagggatcttgatgctgtcgagttttcgtcattcaaagatgatgatgacatattcaaaggaggaagcacaatttcaggtccaattggctggactgatgataaaagcagcgttaatgagcagagccttcattctgcgacggaatttggagcaaaatcaagttccctttcttttcacatgactgagagtcaccagggtaaatctgaacttagttcaccaaggagggcaccttcagtcaaaggtactgatgcaagaacctcagaggataaatcagaaaaggggttgcttgacaatggtgagtatcttatcaggccttatctggagccctatgagaaaataaggcataaatacaactgtgaacgggttgctggtcttgataaacacgatggaatatttttaattggagaactttgcttatacattattgagaacttctacattgatgattccaattgcatttgcgaaaagggcagtgaagatgagctctctgtcattgatcaagctttaggtgtgaacaaggatataatgggaggcagtgaatctcagttaaagtcacctaccacttggggtgggacagcaaaggtcttgcttggtggcagatcatgggcatataatggaggtgcttggggtaaggagaagctttgcaacagtagcaacctgcctcatccatggcatatgtggaagcttgatagtgtccatgagttgttgaaacgtgattaccagctccgccctgttgcaattgaaattttcagcatggatggttgcaatgagcttctagttttccacaaaaaggagagagaggaagttttcaaaaatttgattgccatgaatctcccacggaatagcatgttggacacaaccatatcagcatcctctaaacaggagagtggtgaggggagccgtctttttaaagtcatggcaaaatcattttctaaaagatggcaaagtggagaaattacgaacttccaatatctcatgcatctaaatacacttgctggtcgagggtatagtgatctcacacagtacccagtatttccatgggttctcgcagattatgagagcgatgttttagatctgaggaatccacagacatttcgcaggcttgataaacccatgggatgccaaacggaggaaggtgaagaggaattctgcaagagatatgatagctgggatgaccctgatgtaccaaagttccattatggctctcattattcaagtgctggaattgtccttttctatctcttaaggttgcctccttttagcacagaaaatcagaaattgcagggtggacaatttgaccatgcagaccggttattcaacagtgtgaaggatacatgggtaagtgctgcaggcaaaagtaacacatcagatgtgaaagaactaattcctgagttctattatttgcctgaatttttggagaaccgttttaatctggatctgggcgagaaacaatcaggagagaaggttggtgatgttgttttaccaccttgggctaaaggcagcgccagagagttcatcaggaagcatcgggaagcactggaatcggattatgtatctgagaatctgcatcattggattgatcttatttttggatataagcagagaggaaaggcagctgaagatgccgtcaatgtcttctatcactacacatatgaaggcaatgttgacatagacgcagtatcagatcctaccatgaaggcttcaatactagcacaaatcaaccattttggtcagacccccaaacagttattccagaaaccacatccacagaggcggactgacaggaaagtccctcctcatcctctacggtactgtgcctatctaacacagcaggagattcgcaagacagcatcttcggtgtcccagattgtctcctacaatgataagatcctaattgctgcagttaactgcttgctcaagccgctaacttataatgaatacatttcctggggattccctgaccgaagcttgagaatattaacatatgatcaggatagacttttgtctactcatgaaaaccttcatggtggtagtcaaattcagtgcactggagtgagccatgatggcaacattctcatcactggtggtgatgatggagttgttgcagtgtggagatttgtgaaggatggcatccgccgtctcctgagaatggagaaggctttgtgtgctcacacgggcaagataacttgcgtctctgtcagccaaccttactcattaattgtctcaggctctgatgactgttctgttatcttatgggacctgacaagcctagtctttgtgaagcagctaccaaggttcccggcatcagtatccgcgctacatgtgaacagcctcactggtgagattctgactggtgctggtgttctttttgctgtttggagcatcaatggggactgccttgctgtggtgaacacctcccagcttccttctgacctcatcttgtctgtgacaagcgcgacacactcagactggcaggacacaaactggtacgtgacaggccatcaaagcggcgcggttaaggtatggaagatgttgcactgctcgtctgatgaagcagtaaatagcaagagcaaatcacctgcggtatcgtctggtgggcttagcctgaacggccaagcaccagagtataggctacttctgcagaaggtgctcaagtcacacaaacaccctgtcactgccctttgtataccaccggacttgaagcagcttctgagtggcgatggcagcggtcacttgctctcatggtcattgaaagacgacagtttcaagggttcatagcacagagaaatatagggattcagctgcacatatagagaaacactggttaaattgtaccactgatttcttcctcgtccagaactgagcattggcgtgcattgacaaaagatctcggatcagcaagcttctacatggtatatgaaatgttcccttgatgtcccatgcctgggccatacagcagtccgggcaggagagagaatacaacagacacaattggaaggatgaagtggacgtggatgcgccgctgcgctgacatcataatcttatactgtgaattatgagatggttgtaccttctcttgtttttttgaggagaaaaggattcatgtgggctgtaggtgccattgtttgtaaagtctatacagggtaattttggtggtgccggttgaggtggctgatggtgtagtgtctcgatgttttgttcggggttgcgggagcaaggaaagaggtattaggttcaaaatctccccccacctctggaggctagtttgggagccacaaaaccgaaagtgattggatggactaaaagcttctacatattcaaaattgaataagaacgagattttaatcacttcaatcctcttcgattttgtggcttccaaactagccccagaagtgttgattctttgactgggtgtaatttgagcacccttgtgttcagtaagtctatttgcgtatacatgcaagagttttgctgaacaaagcgacgagccccttccatgnttcgattggaagtgaagtgtagtgtcgcagatattttctccgccctaaattataagtagtttgatttttataagtagttttgattttttttttctagggaagccaaaataacatagttgaaacagagggagaaattcagaaattttgaaggtttaatgtgtagttcagccaccgttacggttcacattcgtgatgcaacagcacggcttacattcgtgttgcaacagcccggcagcggctccgtgcagctaattttggagagctaaatggtttaactttgagtataatttttcatttttataaccacactgttctatatagagttaatttaaacaataataaattagaaatgaagcggctccatttcatcatactctagaactaaatcctacctaagtgtagccgtgcaatcacagatcaacaagcggataagatgcattaccaatcgtttttttgttcggttatacaggaatagggaattgaaatttcttcctaatcaaaattaataaaaaggatttaatttcctttgatccttgcgcaatcgaaaagaccttaagatgttcatctagaccgacgccttgaatccgatcgacgtatcctctcgttgttgtcactaggatagacggcactttctctgtatacaaatgtttgtcattgttatttttaaggagttaattatttttaactttaaccatatttatataaaaagatcaatatttatagtacataatttgtattattaggtagatctttaaatctattatatttcataactctaattaaatttgagaaaatttgaccataacgacaaatatttatggacaaagggagtaacatgaaagtttatctagaaattcgcccatggctccatgataattttgtagccctacatgtgaggcacaaaatcgtagatgtctcgactctgttcttcgctcttcgcaccaaagagaaggccctaagagcagtcccaaccc

SEQ ID NO: 5490 - DNA, 1866 bp, Zea mays
gctacgagtctacgaccagttcggcagcacggcgagcatcccgtccgaccatccgctcgctcctcagagctagcctccaaactcgcaactatataacattgggcccctcgaggccggccgaccttttgcccccctgcttcctccgcctgcaccctctcacgagcgcccgctcgcccagatctagggttccatccgcgggcaagatgagcagcccccatggcggcctcgacgaccagatcgagcggctcatgcagtgcaagccgctcgctgagcccgaggtaagggctctgtgtgagaaggcaaaggagattctgatggaggaaagcaatgttcagcctgtaaagagtcctgttactatatgcggtgatattcatggacaatttcatgatcttgctgaactcttccgaattggtggaaagtgtccagatacgaactacctgtttatgggagattatgttgaccgtggttactactctgtcgaaactgtcacacttttggtgtctttaaaagttcgatatcctcagaggatcaccattctcagaggaaaccatgaaagccgacagattactcaagtttatgggttctatgacgaatgcttaaggaagtatggaaacgcaaatgtctggaaaacatttacagatctatttgattacttccccttgactgcattggtcgagtcagaaatattttgtttgcatggtggattatcgccatccattgagaccctcgacaacatccgcaacttcgaccgtgtccaagaagttcctcatgaaggtccaatgtgtgatcttctgtggtctgatccagatgatcgatgtggttggggtatttctccacgtggtgctgggtatacctttggacaggatatatcagagcagttcaaccataccaatagcctaaggcttattgctagagctcaccaattggttatggagggtttcaattgggctcatgagcaaaaggtcgtgactatatttagtgcacctaattattgctaccgctgtgggaacatggcatcaatcctagaagtggatgattgcagggaacatactttcatccagttcgagccagccccgagaaggggagagccagatgtaacccgtaggacacctgactattttctgtgatgcaaaagtgacgtggatctgcagcaaaggtttgatagataggcgcagtttcctggttgcagagatatataaatatatatctactatatatattggctggagttcctccgcgtgctattcttatattatttctcgcccatggcgctcttggctgtcgccggctgctttgctgcatcgtggttcaagtgtataccctactacagctggaaggactggatcgtgctcttacggtcttacctgtctctaactggttgattggcttagggtgggctgcggtggtgtgtgtgtgggttcaagcatcaggcagccatctgtattatgggaggaagtgttcccgttgtattcattttgttcccctttcttcctcatctgattttcttctctttttttatttgttccttctctgtgattcttgtagagttcagaacttgtatggttctatgttgggccattagttttttttaactctctttctctgactgccccgatttgccgtatagaattacatttctaagcgcaactagccaacctgtagcattttctgtcaccagcatttgaagttttgaactgagccctggtcgtgtccctgaggtttgatgtgctcttggtgtactactcgtatttgctaattagaaaaggaccttttgtgggtttgctagcgtttggcactaacgcccacgctagaatgttttgacgttgtccatgtgacctggatggaagctgtgaaccgtaattggct

SEQ ID NO: 5491 - DNA, 1653 bp, Zea mays
aaattcacgtaatctgttgcaatgatatatttttttagttttattgaaaaatagggaaaggcagaaaaaacgagaaaagattcgagtttctaaacccgtcacggcgtcttgttcagaggaattccattcctacgaagaaagtatttccttcctcctgaatcctgatctctcacggagttcccctgtatggcgacgcctcgctcaccgagccccagcgccgccgcgcgtctcgattctgcgccgctgctgggcggcgcctccggcggcgggtcccgtcgccgagatggagcgcttcgccggccctccctccgcggcgcggcgcggctgctgcgtcgcggcgggcggcgggccatgcgggagccctcggtgctggtgcgggaggccgccgcagagcacctcgaggagcggcaggctgactgggcctactcccgccccgtcgtggcgctcgacctgctgtggaacctcgctttcatcaccgtcgctgcggtcgtgctcgtgctcagccgcgacgaggactcgcccatgccgctccggacctgggtcgccggctacgcccttcagtgcgtcgtacacatgatttgcgtcgcaatcgagtacaggatgcgccacggccagcgcggcggcgccggcgctggcgcagcgcccgcagacgtggaaaggggcagcgacgcatcgtcctcatccagtgacgaggatgacagggagctcgatctccatggtcgccgcactgattacgccagtattgcgaagccccgggtcccccctcgcgcccggttctccttcatatggtggataattggattttattggatatctgctgggggtgaggaggttattcgggatgcacctcaactttactggctttgcatagtctttctggcatttgatgtgttttttgttgtattctgcgttgctctggcttgtattattggtattgctgtctgttgttgccttccttgtatcatagcaattctctatgcagtatctgatcaggaaggagcatctgaagatgacattcgtcaaatcccaagatacaaatttcggcggacggatgagcctgagaagcaagatgttgaccccatgggtccttttggtggaataatgatagagtgtggcaccaatcaacctattgagaaagtgcttgcagctgaagatgcagagtgttgtatttgcctatcggcttacgatgacagtgcagagttgcgcgaactcccctgtgggcaccatttccactgcacctgtatcgataagtggcttcacatcaatgcaacatgccccctgtgcaagtacaacattcggaaaagcagcagtagcagtggaagtgaagaagtatgaatgcagtccgcttgacaatgccaatctgtttcaacttctgttccgttgctaatgtaactccaggccttgatgagtgtaaatttttgtatccaaaaaaatgtgctgatagagtcagttatttatcaaagttactcaaagtgctgtcaatatgtcatataagttaataaacagttgggtatgcttctgtatttactgtcaggaatatattattagttgcattgtaacttgtgtccttttgaatgatccgggtgttttcctgcttggttaatgatgacaaaatgtcttgcatggtttcttatgacaaaaaaaaaaaaaaaa

SEQ ID NO: 5492 - DNA, 2085 bp, Zea mays
ccggcccggagttccccaaagttcccaacgccgccgcgacggcgctgctagctagtctttggtgttgcaggtgttcgattcctgattccaaattccagactccaaactcggttcttcaatcgacagattccgatttacatcccaaagctcttcggattgaaatccagccgcgacccaagagataagagtatttgggattagtagatagggagggtagataggatagtagaatagaagaggagcactttcgctgatgattacggcggaggagaagagccccgaaagggaggaggaggaggaggaggcgaacccgcgcgcggaggcttttctggagatcatctgccgcgtcccggcgggggaggtggaggcggcgctgtccgcttgcggcatcggccccacggccgaggtcgaggaactggtgctcaagtcccgcgaatgctacaagcgccctaagtccgccgtccgcttcttccgctgggcggggcagtccgtgtcgcacaccgcctacgcatggaacctccttgtcgacatcctcggcaaggccgccatgttcgagcccatgtgggacgccatccgctccatgaagcaggagggcggcggcgggctcgtctccgtcgccaccttcgcctccgtcttcgcctcctactgcgccgctggcaacatcaaagatgcaatcgcggccttagacgtcatggaccgctacggcctcaagcacgacgccgtcgcgctcaactcgctgctctcggcgatttgccgcgtcgagggtcgcgcgcaggatgcgcaggacgtcttcgagcgtaccaaggcaaccatcccacccgacggcgacacgttcgcgatactgctcgaggcatggggagaaggaggggaacgcggtgcgcgccaagagcgtctttggcgagatggtcgtccgcatcggctgggacgcagccaacgtatccgcgtacgactccttcctctccactctcgttcggggcggcctgttggacgaggccttcaaatttctgcaggtgatgcggagcaagggctgcttgccggggatcaattttttttctacagctgtggatctggtcgtccgcaagggtgactacctcaacgccgtagccatctggcacatgatggtctctgaagccggcctcgttcccaatttctcaatgtacagcgccatgattggcctccactgcaatgctggtagcatagacgatgctcttgggttgcttgatgaaatgcccctcaacggcgtctttgcaaattctgtcacatacaacaccatactggaaggattcatcaagcatcgcaaggctcgtgaggctgaaagtttcctaacggagatgagcaagaatgagcaactgcctactgcatccaattgcgctgctgctatcagcttgttctttaaggagtttaacccatctgcagcaatcgacgtgtggcgctgtattgtggagcacaacattaccccagctgaggactctgccaaagagctaatagcagggctgcttgattttggcaggtttactgaggtgacgaagcgtgctgatgagatgattgacatgagagttgagttgtcacggtccacaatggagaatatgaagcgtgcttttgctaaggctggcaggcaccaatcatatgacaacattgcaagaaggctaaagcgatattagctgcacatgaatgctttaatcagctgaaactttgcggctcacggggtagaagtttaacgcctggactgcttaattgcatgacaaccaagaatttggactagcctggatcctggaatgtaagtctggaaatctggaactgtactctgatcccacaagcagtggtcgggatgttagtgtagctcttgtagattccggaccccatttgttagctggttactcatcgagtgtaataagtggctagtttagtgaggctgcacattatcgctgtttatttttcagatatattttatgaatatgaaattgggttatgtaagtatcagatattcctggctgtcagcagcgtcaggcgcctctgctgatcctttgaccatattgtttttcgtggaagaagctttttaacttcttttttttccgggaaggtttg

SEQ ID NO: 5493 - DNA, 2074 bp, Zea mays
ggcgattgggtttctacgaggccggccgctctggcctggccggtctgcctcgtccgcttctctctcacccttcctccccctcctctcctgtgggtgctctccctccctctccccccccccccccccccccaagcccaaatcaccgggcctcgccccacagcaccggttgcgtgggaggaaggaggggaggcggctgtcgggcgagatgagcgactcctactgccccgactgcaagaagcatacggaggtggcgttcgaccactcggcgggggacacggtgtgcaccgagtgcggcctcgtcctcgaggcgcactccgtcgacgagacctccgagtggcgtaccttcgccaacgagtccaacgacaacgaccccgtccgcgtcggcggcccctccaacccgctcctcaccgacggcggcctctccaccgtcatcgccaagcccaacggcgcccagggcgacttcctctcctcctccctcggcaggtggcagaaccgcggctccaaccccgaccgatccctcatcctcgccttccgcaccatcgccaacatggctgacaggctaggtcttgtggctactattaaggaccgagcaaatgaaatcttcaagaaaattgaagatctcaagtctattaggggaagaaatcaagatgccatattagccgcatgtctatatattgcttgtagacaagaagatcgccctagaactgtgaaagaaatatgttcggttgctaatggggccacgaaaaaagaaattggcagagccaaagaatttatagtgaaacaactggaagttgagatggggcaatctatggagatgggaaccattcatgctggagattttctgaggcgtttctgttcaactcttggaatgaccaatcaagctgttaacgcagccaaggaggcagttcagcgctcagaggagcttgatataaggaggagcccaatctcaattgcagccgccgtcatttacatgataacccaactctcagaggacaagaagccacttaaagatatatccttggctactggtgtggcagaaggcaccatcagaaattcgtacaaggatctgtatccctacgcctcaaggctcatcccgaatacctacgccaaggaagaagacctgaagaatctctgcacaccttaggaagctttactttttttcccttctgttatataaatcggaattagatttgtcaaagaggagtgagtgaagttgttcctgttgtgaccgactgtactgagcaatgtgtcgtcgccggcgcgcttaactttgtggatggaccaatgagaacataagttgtcatcatcagatcgaatttcttttcagagcacctgccacctgaagatttttttgggatagcaaaggtgtcgttttcgtatactccctttgggaaaggatgtagatagcaagcagtccttggaagtgcacaagattttatttaaaagaacaggattctgttccccatcttcaaaagaaaccgtcatttatccatcattctgagtcaaacaaaatgtttagccaagttgtcaactcgctattagccaattagctgatcaatcctaacttactgatcaacccagcaaatttaagttaattttagccctggccatggcaagggggaacatccttgtccttaacgttgcaagggggaaacatcatgtgaacctttcgaagaaaagtctctgttcatgtatggcgtgtttggtaggctacatatgggccggccaggctgctgtatctgagatacacgtttggttgcttgtctctgtatctggtggactgaagggtatatctgtgctcacctgcattgcgggatgcaacagagtcaggctatggagaaacgggtttcatttctgtgtctcaggatttggttgcttgtctctgtatctggtggactgaagggtatatctgtgctcacctgcattgcgggatgcaacagagccaggctatggagaaacgggtttcatttctgtgtctcatgagtggctagcctgtttggagcggccaggctacactgccaaacgaaccaaacatgctagtagtatttgtcacccgtgggcaggttagcagggg

SEQ ID NO: 5494 - DNA, 2664 bp, Zea mays
ttgaacctggggaatctgtgaccgatgatcgtatattgggtgcccgcatgacaaaggccagccttgttcctccagttactaggaagtatgaagttatcgaggagtaccttattgtagcagatttggaggaagtacagcgaaaaatgagagttgctttacctgatgactattctgagaagttccgctcgcggaagaatggcaccgaaaacttggaacttccagaggttaaggattatcaaccccgaaaagtagcaggagatgaaattcttgagcaagaagtatatggcatagatccatacacacacaatctactgagtgacattatgcctgctgatcttgagttgtcacctaccgacaagcatatctttattgaggagttgcttctgaatacattgaataagcaagttaggcatttcactggttcgggaaatacccctatgacttacaaccttaggcctgtcattgaagagatccaaaggtctgcagaggataatggtgatagacgaacttcaaagatgtgcttggggatgctaaagaccatgagaaatcgctctgaacagaacttcgttgcttatagaaagggtctcggtgttgtttgcaacaaaaaaggtggatttggtgtcgatgactttgttgtagagttctttggggaggtttacccttcttggagatggtatgaaaagcaagatggtattaaacatatacaaaacaacagtgaagatcaagctcctgagttttacaacattatgttagaaaggccaaagggagacggagatggatatgacttggtttttgttgatgcgatgcacaaggccaactacgctagtagaatctgccactcctgcaacccaaactgcgaagcaaaagtgacagcagtgaatggtaaataccagattggagtttacacacttcgaccaattgcagaaggcgaggaaatcacttttgattacaattctgtaactgagagcaaagaagagcatgaagcatcagtctgcctctgtggaagtcaagtatgccgtggcagctatttgaatttttctggtgaaggagcctttgagaaggtattaatggaattccatggtgtgctcgataggcatagcctgctgctacaggcttgtgaaacagactctgtctctcaacaagacttaattgacttgggtagagctggtcttggtacctgtttgcttgctggtttgcctggatggcttgttgcttacacagctcacctggtgcggtttatataccttgagagacagaaactccctgatgagatcttaaggcacaatgtggatgagaagcgccagttccttatagaaataaacatggattctgagaagaatgatgctgaggttcaggcagagggagtattaaattcaagattacagcaaatagtgcatacacttgacaaggtgagatatgttatgagatgcatatttggagacccaaagaatgctcctcctcctcttgtaaggttgtctgggaaaagtctggtatctgccatctggaaaggggacagttcaatagttgctgaactcattcagtcgatggaacctcatgttgaagaagaggtacttagtgatctgaaggccaaaatccgtgctcatgatccgtcagagtctgaagatattgagggaggcatccggaattctctcttgtggctgcgtgatgaattgcgaactctttcatgcacttacaagtgccgtcatgatgctgctgcagatttgattcatttgtatgcttatacaaagtgcttcttccgagtccgggattataagacagtaaaatctccaccagttcatatcagtccgcttgacttaggccccaaatatgctgataaactgggaccaggctttcaggagtactgcaagacatacccagaaaattattgcttagcccagcttatctattggtatagccagaattcagaacctgaatctagattaacaagagctagaaaaggttgcatgtcgttgccagatgtctcatccttctatgtgaagtctgcaaagccatcacaagagcgagcttatggaaacagaactgtgagattcatgttatcgcgcatggaaaaacaggcacaaagaccatggccaaaggataggatatgggtgttcaagagtgatccgagattctttggtagtccaatgatggacaccgtgttgaataattccccgcttgacaaggagatggtgcactggctcaagactagaccaaatgttttcctaggctagtaaaaaaggtttgtaggcagataaggtggtatttggttctttctcctttttggagattttagtctacatgattctttttccgactcacaccttggctacctgatcatggggagtttagcttttagatagcagggtagtctcaccacccccatctgtacattcctctctccctactttccttgtagagatgtatctggttaataactgatagattcgtcattgatttgatgtagtgaattttccccataggaacgctccctcttctgtttcatgtaaatgcagaacaatttcaatcttgaattcagtaatgtgttacaggcatgttgcatttcagaagatcaaaaagaaaagaaaatcaataaattgttttaggggcttataggtttcattcataggaaataatctgtgcatgagttttgatgattgaacctgt

SEQ ID NO: 5495 - DNA, 2843 bp, Zea mays
cctcgaggccggccgggttcccccccccgccatttttctcctcccactgattttgcattttagcccctcaggaagctccgatttcggccccgctccggcggaccgcttccgttcgtgctctgctccgaccgagcttgccgcgccgtgggggacagctgcgaggactctcgttcggcggctctggttctcggcttggtcccgtttcttccccaacaaatctcgtgatttttggttcagatttggcttctcggcgcccgtctgggtctttctcgtgcgtttcgcctttggtttcgccgatttggtgccggattcggtgggttgcggccgagtagcctggatctcgggcgccggtctagcgctaggagccctcacactgtggatttcctgccggaggaagcttttcaagggagctagtagctagtagctagctgcctttgggagcagtagctcttctagtctctgaaggtttcaccatacgcggtggagagcgctattagcttgaggagtagatttcgtgtagcggtgagcaaagtttgggtgtcaagtctggtggtggaagccttcaggcttgagattttctccctcacgacaccgaaggagcacgccggctctggaaggaatttcctgccatcccagaggctgccgatttcctccctcccgggaagcaagcaagggctttcttctagacgagctcttctggttccttaagtttgtgggccgtggctatttaatctccaactgcatccccagatattcaccaaattctgtgagactgggaactccgggattggtttggataaggtgttctgggaatggggaaccaatgcccaaacgggacccttgggagtgactactacaaccgccccgcttccaggttcgctgatggttgccttgaggacgatcgctactctgacttgaagaagtttgacaagccatggcctgaggtgaactcgtttaagcccactgctgttggtattttgaagaggggattggatccaacgtcaatcactgtccttgaaaggaagacggccgacgtaagggaacattatatcatcggtcggaggcttggtcaaggccagtttggcacaacattcctctgcaccgagatcagtacagggtgtgagtatgcatgcaagacaatcccaaagcgaaagctcatcaccaaggaggatgttgaggatgtgcgccgtgagatccagataatgcaccatttgtcaggccacaagaatgttgtttccatcaaggatgtatacgaggatgggcaggcggtgtatattgtgatggagctctgcgccggtggggagctctttgatcgaattcaggagaaagggcattacagcgaacagaaggctgcagatctcataagaatcattattagccttgtggctatgtgccattcacttggggttatgcaccgtgatctaaagccagaaaacttcctcctttgggataaagaagatgacctgtcaataaaagcaatcgattttggtctatctgtgttcttcaaaccaggtcaggttttcactgagctggttggaagtccatactacgttgctcctgaggtactacacaaacggtacggaccagaagcggatgtgtggtcagctggagtgatactgtatgttttgcttagcggggtgccacctttttgggcagagacgcaacaaggtatatttgatgctgtcttgaaggggcacattgattttgactcggacccatggcctaagatatctgaaagtgcaaagaatctcataaggaagatgctctgcccttgtccttcagagcgtctgaaagcccatgaagtactacgccatccttggatctgtgaaaatggagtggctactgatcaggctcttgatcccggtgttctctctcgtctcaaacaattctccgcaatgaacaaattaaagaagttggctctgagagtgatagctgaacgactttctgaggaggagattgctgggttaagacaaatgttcaaggcagttgacgttcaaaatagaggcgtaattacttttggtgaacttagacaaggtttaaaaagatatggtagcgaattggagaatagagaaattagtgatataatggaagtggctgataatgacaataatgtgaccatcaattatgaagaatttatcgctgcaactgtgcctcttaacaaaatagaacgtgaggagcacctgatggcagcttttacctacttcgacaaagatggaagtggttatatcacagtcgacaagctgcaacgagcttgtggagaacatgacatggatgacactttccttgaagagataattttagaagttgaccaaaacaatgacggtcagattgactacgccgaattcgtagccatgatgcaaggcaacaaagttggacttgggtggcaacaaatggaaaccactttgaatgtaaccttgagagatgcacctcaagtacactgtcactgacgcgctcgccatgtacagattttgttctcttctcgtgttcatcgtttctccacacgacctgagagttccggtcgacatgacatgtatcacgaggagagagcaaatcaatcgattcatttagtggtatttatcccaaataaagtgtgggctggcaggcagaatatggtttgtcatgagagacactagtatgggtttatatgtataaatatatagcagtggtggtatattggtttatggtagcgggtgatcctgtcaagcgattcaatcgaaataccaaaagaagtgcgttcagtttgcccgttttgttacgggtttcatgaagatgaaggtgattatgttttctcatgtcgagatttgcacttccttaaaacgcagctgattccccaattctttttt

SEQ ID NO: 5496 - DNA, 1338 bp, Zea mays
cattgggtccctcgaggcccgccggagtgccctagtaaccctagccgcctgaggccgacgccaactctctcctgaccgcaacggggaactcgacccccgcctccgccaccgccaccgcgccggtcgccgacccactcagatgaacacgtctccgtccagatacagggcaatgatgggaggctgggggggttcggatgggtacgagggatcaaagaggacgcgaatgatgatggaatcgaatccctacttcgcagtgaacgcagggagcccactggatgtctcaaagagggcaaggatgatggaaccaggtgctccctattttggggctatgggaagcagcgccagcggtgccggcggtggcttctaccagccctttaacagcaacctagctggtgcagggtctagcaccggtatccaaagcttcccatgtgtccggctgcgaggcctcccctttgattgcaacgacattgacgtctgcaagttctttgtggggctggacatagtggactgcctcctggtcaacaagaacgggcgcttcaccggcgaggctttcgtggtcttcccaacagccatgcaggcagagtttgcgctgcatcgcgacaggcagaacatggggcggaggtatgtcgaggtgttcaggtgcaagaagcacgagtactactgtgcaatagccaatgaggtgaaccagggcggttatttcgagccggagtaccgccgctccccgcctcctccgaggcctaggaagccgtctgaagataagggcagcatggagtacacagaggttctgaagctccgcgggcttccctactctgccaccactgaggacatcatcaagttcttcctggagtacgagctggcagaggagaacgtgcatatcgcctaccgcaccgatgggaaggccacgggtgaagccttcgttgagtttccgacagctgaagtcgcgaagacggccatgtgcaaggataagatgaccattgggacgaggtacgtggagctgttcccgtcgaccccagaggaggccagcagggcgaaatcccgaggcaggcattgaagaaacgtgttccagtgatcttctgtatgcatgcatgcggccgcgttcgagctcagttttcattttgcatgcttgcctctgtgtgtcgctgttaggtggtgttaacctgagctgtcatgtttcgctactgatcgtgcagtgatttgttatatctgaagttctgaactgaattgtaacagttgtcttctgttggatgcacttgtatggcatatcgttttctataaaaacacgaaggttgcttgtccaaaaaaaaaaaaaaaaaaaaaaaaaaaaaaactcgagcccgg

SEQ ID NO: 5497 - DNA, 2951 bp, Zea mays
ctcacgcgtccggtgggacagccacaacagattcgaggccggccgggtttctttctcgctcctatcatttcgttccgttcctgatacaggcgagcagggacgactgcaggcctccccctctttctcggcttccactcacccgccaccactggaccacccccaacggcgagggagtgagagagatcggcagcagctcgggggcctggcagggcagctgcattgcgctgcggcgggcggcggccatggccgattcgtacggcgacggcaagggcccatcactcaagagccagagccagaaccagcagccgcgccctggcccccgcctcaagcccgccatcgagatggaggatctcatcaacctcctccacggatccgatccagtccgggtcgagctcacccgcctcgagaacgaactgcagttcaaggagaaggagctgggcgatgcgcaggcggagatcaaggctcttcgcttgtcggaccgcgcgcgcgagaaggccgtacaggatcttaccgaagaattggcaaaggtggatgggaagctgaagctcacagagtctctccttgaaagcaaaaaccttgaagcaaagaaaatcaacgacgaaaaaaaagcagcgcttgccgcacagtttgcagctgaggcaacactacgaagggttcatgcggcacagaaggatgatgacatgcctcctattgaggccatccttgcaccactggaagctgagctgaaactggcccgtcaagagattgcaaaattacaagatgacaacagggcattggatcgtcttacaaagtctaaggaagcagctctgcttgaagcggaaaggacggttcagatggcactggcaaaagcttccttggtggatgatctgcaaaacaaaaaccaagagttgatgaaacagattgagatatgccaggaagagaacaaaatcttggatagaatgcaccgccagaaagttgctgaggttgaaaagctcacgcagactgtcagagagctagaagaatctgttcttgctggtggtgcagccgcaaatgctgtcagagactaccagcggaaagttcaggagatgaatgaggaaatgaaaactcttgatcgtgagctagctcgtgcaaaggtttcagcaaatagggttgcagtagtggtggcaaatgagtggaaagatggcgatgataaagtaatgcctgttaaacgatggctcgaggagcgaaggattctgcaaggagaaatgcagcaactccgggacaaacttgctattgcagaaagggctgcaagatcagaagctcaactgaaagagaagttccagctacgacttaaggtactcgaggaaggattgagaatgtctacatcgagaaccaatgtcagtggcacacgccgccagtctattggtggtgctgatggtttgtctaaggccaacggcttcctgtcaaaacgcccatcattccagatgagatcaccagtgtctaccacaacgactctagtgaaccatgcaaaaggagcgtccaagtcgtttgacggaggctgtagatcacttgaacgctataagggccatgtaaacgggaatggtatgaacgtatctaccgattccagtgaagataaagattcaaacaactcagatgagaagtgtaacgagtttgcatctgctgagtcggaggactcggtgtcaggtgttctatatgatatgttgcaaaaggaggtcatttctctaaggaaggcgtgccacgaaaaggatcagagcctgaaagacaaggacgacgcagttgagatgttggcaaagaaagtagatactttgacaaaagctatggagtcagatgccaagaaatcgaggcgcgagctagctgctatggagaaggagctggcagctgtgcgcttggagaaagagcaggataacagggcaagacgttttggtagttcaagcggttctgccagcagttcgcagctcccacctggcaggactttacctaggagcggctcggcgcgcaacatgtgaaggcatgtaggaattgaccgaatatggctttgatgatccttacttggattaggactggtgactgggaaggaacctctcattgtcctggagaagatggcatcagcggaagagcctcttctgcctacatctcgtggtcgcagggatgaactactttgtgtctaacatctccggctagtgttttcttttcttttgttttgacgacgtgtcattcggtggtgattgctgttgtttcttttcttttggcaatttgatgatctttgttggtgctgtataggtttggtgaggcgttgctcctttttcttctttggtttgtttgttcgacatatccgtcggtctggttgtttacgatgtaaaatgtacgcactgaagagttgcttatggtttgcctgatattcccccctgtttctgtcagtgttgggcaagttgatgataaccagcatgatgaatgactcagctggctgttgtaaccatgtgccgaatgatgaagaaaccgctttgcatatgtctgatgatcaccagatgaatggagttagggcaagttcgaccgctttgcatatgtctgatgatcaccagatgaatggagttagggccagtttggtgcggcggcgcgtctaagccgcggcggctgaatcggccgccatacctgcggcggcaaaactacggcgcgccgtggcggcttaggccacgcacccaacagccccttaaactgctgttacttttttttttgttttttttgtcagattataaagtgctggatttggcttggcaaggtgagaatgagagtaacctttactagcgctcgctgttgctgtgcgctgtgcagggcgcatctatccgcatctccgcccccccccacggtggcatcgcctcgcctcgcgtcggatcaatccatcccctcgccctcgccttcacgccctgcctacgcaccctgtccccaatccctccgtgcacccccacttcgctcgc

SEQ ID NO: 5498 - DNA, 1779 bp, Zea mays
  misc_feature (1759)..(1773): n is a, c, g, or t
acccggtaaaacaactgcggcaaaactcaccaagcccccaaactgttaacaggtgataaagcttttctctctcttggccggccagtgacatcagacatcaccaactcgtcgacggtagagagagcaagctcttcggcgatttgagaagaatcgaggagcgagcgagcgagcgagcgagagaggaggaggaggagctggggcttgagcctgcgcccgggggccccgggtcacggaatcctaccattaccaaccctagccttcgttgatcgccgtctcaggtcatggcagggccggcgccggatcgggccgccctgactgtggggccgggcatggacatgccaatcatgcacgacagcgaccggtacgagctcgtgcgcgatatcggctccggcaacttcggcgttgcccgcctcatgcgcgaccgccgcaccagcgaactcgtcgccgtcaagtacatcgagcgcggcgagaagatagatgagaatgtccagcgtgagataattaaccatagatcattgaagcaccctaacattattaggtttaaagaggttattttaacaccgacccatcttgctattgtcatggaatatgcctctggcggtgagctttttgagaggatatgtaagaacgtgcgattcagtgaagatgaggctcgctacttcttccagcagcttatttcaggagtaagctactgccattcaatgcaagtatgccaccgtgatttgaagttggagaacacacttctagatgggagtgacgctcctcgcttgaagatttgcgatttcggttattccaagtcatctgttcttcattcccagccgaagtccactgttggaacacctgcttatattgcacctgaagttttgttgaaaaaagaatatgatggcaagattgctgacgtttggtcatgtggtgtaaccctctatgtaatggttgttggcgcatatccttttgaagatccagaagagcctaagaacttccgcaagacaattcagcgtatcttgaatgttcagtacgcaattccagacaacgtgaacatatctccagagtgcaggcatctaatttcgaggatttttgttggcgatcctgctacgcgaataacaatccctgaaatccggaatcatagttggttcctgaagaaccttcctgctgatctgatggatgatgatagcatgagcaaccaatatgaggagcctgaccagccaatgcagaccatggatcagatcatgcagattttaacagaggccaccataccacctgcctgttctcgcagtataaatgtcctagctgatggactggacatggacgacgacatggatgatcttgattccgactcagatcttgatgttgacagcagcggtgagattgtgtacgcaatgtgagtaacatctcagcagccatctcagcagtcaaccaaggaaccaatcaggcatgggatgccctgttgtatactctggcaaagggcatgcttccttttgtgaaaaacatccatgtagttttctcaaggaatcgcaatgtgttctgtggaacacatatgttgtagtcaaactcgggttactcagcttgtaaaactagcctcctcttgcttcctggttactgggctttggatactctcaggcttcgacttgtgtgttgctgttaaatatgtataagaaacttctactcaggttgatctgtgaatctggattcgggtagtggttttgctcaaaaaaaaaaaaaaaaaaaaaaggcccaaactcgagggggggcccggtacccnnnnnnnnnnnnnnnaaaaaa

SEQ ID NO: 5499 - DNA, 2745 bp, Zea mays
tttttttttttttgacacatacagctacaaagtaatataatttttctttttagacttttcttacaaagtgggtattatacataccactggtttccatccagcagattgtgttaccattgttcaccattcaacagtaaagcttggatttataggcaacacagtaatatgctacataatgtacagactgagctctctttattctataaaacgggtaatatggtatacatatcaaatgtacatacaacttctacatcagggttagtatttacagtaggaaaaggcaatcctctccagctataaggagcttccattgaaatgtttactgaaagcttcttcgtccttgcagtgcacccacaagaccttgtacacctcaattagcaactttggaaatcggctagcaaaatagtgatcaaatccctctggcaatgacccaagtatgcccttgagatcatttgaaagttctctgtaatgacccgatttatttctgatatacctcagaagatcacgagtagactcaaagttatattttctataacgacccatgtctgtaactaaagcagcatccagtttctctccccatttcccaccaaacgccactggtcctatgctttccagtgcgtttatgaggtccgtttcactggttttctcaattctgtcactggtatcccttagaaacgaaaggcgcaattcagggctccagaagagaggatgatgcatgacgtatactgccgttggtcttgtctctgggtttggttgtaacagttgagatataagatgtactgcttctggtatgtagtccaccacaaagagatcaaagcgattgtttacaatgtttgtatcccgttcatagtattcaccaaacggatgcttgcctttagtgatacaatagaaaataaggcagcccaaactaaaaagatccattgcacgagtttgacgaccatgacgaagctgttcgggtgcttgccagccagagcttccaattcctgtaccatgatggctaacagaagtcatgtcatcttgcaggtgcttactgatacccatatcagaaagctttgctctaataggtccttctgcgcttattaagacattctgaggcttcaaatcacgatgaataattcccaagttatgcaaatgcacaaggccagcaaccacatctctcatcagcttcaggagttgtgctgaaggaagcccatcctgcgtccacaactccacgtctattcccttaacatttgaaatctttgagttgatgctcatactgacctcattgttagaaatagactctccagaagacaaatatgactgtttttggattaggtcagccaagctgcagtggcacctctcaagcgagatataaacaaaatcactgtcatggtcacaaccgtagagtctaacaatattaggatcatgatccgatataataagatttcgagtctccttttcggctatgtcattgtgggaacgcagcagacgtttcacggcaacttgacgaccatcataagatccttcaaaaacaattgtgccattgctccctctgccaatttctttattggagacatataccttaccaatctgacgaccaccaagggcatctgttagcgcagaatttttcattggtgcctcagttgacccaccagtatcactgcactccttgtcagatgctgtcaaggtctcagagctattgacaagtccatccttcttccgtgtttttctttttttgggagttccctccgacctgcctctaatgtccaccgatttcttgttgtgcgtgaatggctcaataagttgaatcataaactgcctgcatgacttgcttgcagatatcaagctcaacagataaccagtgaccaaaaatatgggaaacaaagggaatagccatccagaagtgttcctagtggggtttagggtagcttcaggatcggcagagatggcatgagatcgagcaacatcatgagtttgattttgagaatcatccaataggatatttgacttcccagcagtgtttggtagcttccttggggtttgaactggttccaaagcatcagaaccatgcatagaaacaaaaggggtaccatctttcaagacaattacattagctgaatttaaatcaggtaaagcaagtggcaaaccctcagttctaatgcatggaatgtctccttgcaggcaagatgactgatcaagcatgtcagggtgcttgtatttcacatagtagtttgcagtgaaagaagttcttgtccagttaaataaatgattgccaaggtctgatgcactgagagaatagtcagttctcacaagcactatgatattatcactgtcatcactagtacggacatttagcttggatggtgctccttcaacccctggtccttccaattcctttaacgcagatgggatactatgcctgtaaataatctcaccactatcagcatcaactacaaaaacagttgaaacttttgatccgatagtaacaacagaatcccgaatatatgggctcctggcaacgaattcctccaatttccatgggagcctctcccggtcgccccttataaacctccaaaaaatcagtactattcccattcatgttctcgttcccattgaaaggataaatgaggtaattcggaccagactcagtggtagtaatatggtctgagagtggaaggccctgtggcaatctcccacagaggagattgagacagcttgtccacaagctgaatcgtgccattgtcgtaaaactggagcacagatctg

SEQ ID NO: 5500 - DNA, 1837 bp, Zea mays
ctcgaggccggccccgccgtcctccaaacgggacctgccacgtcacgtggcaacgcgtcataggtgtgagtgtgagtgtgtgacactgacatctgagaccagctctcctgcttcgcggctgtctctttcatcggccacccacggcggcggagcatagcagtaagcaagcagcggagacgccggagagcggtgaagaagcatggagatggagcagctctgctcgctgctccgcgacctcgacgcgctcaagcagcatcccgacgatctcacttccaccatcgatcggatgcgggagcggctagtggcgatgatgaatccggcagccggtgccgcttctcgatccaagattaaggacatgagtgcagaagtggtggacaacaatccctacagcagacttatggcgttgcaacggatgggcgtagtggagaattatgagcgcatcagggactactccgttgccatcgttggcataggtggcgttggtagtgttgccgcggagatgctcactagatgtggaattggacggctgttgttgtatgactacgacacggtcgagttggctaacatgaataggttgttctttcgcccagaacaggttggaatgaccaaaacagatgccgctgtacagacactttctggaataaatcctgatgttgtgttggagagctactcattgaatattactacagtcaaaggtttcgaaacatttttggcaagtttaaaagcacaaagttctcatgagcgtagcactggagttgatcttgtcttgagttgtgtcgataactatgaagctcgtatggttgtaaatcaggcatgcaatgagcttggtcagacgtggatggagtctggtgtctcagaagatgctgtttctggtcatatacaactgctggttcctggtgaaactgcatgttttgcatgtgctcctccattggttgtagcatctggagtggatgagcgtacacttaagagagaaggtgtttgtgctgcctctttgccaactacaatgggtgttgttgcgggtctcctggtccagaatgctctgaaatatttgttgaactttggacaagtttccccttacttgggatataactcacttaaggattatttccctgcaatggaaatgaggccaaatccacaatgctcgaatccagcatgtgttcacagacagaaagaatatatggaatccaaacctgctagagatgcagcagcgaagactaagatggaagctgaagcatccacagaaaatgaatgtcctgtccacctagacaatgagtggaatattagtgttgttgatgatgaagaaactgagacatcaagcattcgaaacactccagatatcctaccagaaggtcttgtccgtgagcttccagacgctgattcatacgcaggaccagctgctccagtgagttccagcgctattgatgatgatgatgatctcgaggagctccagcgtcaacttgatgccctaaacgcatcttagccttaataagtaggctagttcatctgcgccttaattggcttctccccaatcccaacttggatggggaagatgatttacatactgtttttcggagttggtaaattcatagcaccgtggtaaaagaaaaaggagaaaatgatagctatactgcttttgggagttttgacttacagttttggttgagatctgagaacatgtgcatgtctgagccagacagctcgtcggtaatggtactaatgtctgaatttttgttgctgttgatattcaaaggttttatctggaaccgtcatttcttattgagaggttccactaaaaaaaaaaaaaaaaaaaaaactgcgggggggggcccggtaccca

SEQ ID NO: 5501 - DNA, 3077 bp, Zea mays
agatgaggtatctttctctggtgcaagccatcctgccaatatgtacacacaagaagaccttcccaaacaagtttctcgtacccttaatcagggttctaatgttatgagcctggatttccaccccgttcaacaaaccattcttttagttggaacaaatgttggtgacattgcggtgtgggaagttggttcacgggaaaggatagctcacaagactttcaaagtttgggatattggttcctgtaccttgcctttgcaggcttcgctgatgaaagatgctgcagtatctgtcaatagatgtctgtggagccctgatggaactattctaggtgttgctttctcgaagcatattgttcagacatatacttttgtacctaatggagatttacggcagcaagcagagattgacgcacacatcggtggggttaatgatatagccttctctcaccctaataaaactctatctatcatcacatgtggtgatgataaactcatcaaggtgtgggatgctcaaacaggacagaagcagtacacatttgaaggccatgaagctcctgtgtattctgtatgccctcactacaaggagtccattcagtttatcttctctactgccattgatggaaaaatcaaggcatggttgtatgattgcttgggctcaagagttgactatgatgctcctggacattggtgtactaccatggcttacagtgctgatgggacaagattattctcttgtggtactagtaaagaaggtgattcacacttggttgagtggaatgaaactgaaggggcaattaagagaacatacaatggcttcaggaaacgttcactcggtgttgttcagtttgacacaactaggaatcgcttcttggctgctggagatgaatttcttgttaaattctgggatatggataacaataacatactaacaacaacagactgtgacggtggactgccagcaagccctcgtttgagattcaatagagaaggttcattacttgcagttaccacaagtgataatggaataaaaatacttgccaacactgatggacaacgcttgcttaggatgcttgagagtagagcatttgagggctctagaggacctcctcaacaaataaacaccaagcctccaattgtcgcccttggtcctgtttcaaatgtcagcagtcctatagcagtaaatgccgagcgacctgatcggatcttgcctgcagtgtcgacaagtggcttggcacctatggatgctagcagaactccagatgttaagccaagaataacagatgaatccgaaaaggtcaaaacctggaagttggctgacattgttgataatggacatcttcgagccctgcatttgacagacacagacactaatccaagcaaaattgtccgtttgttatatacaaataatggggttgcactcttggctcttggctccaatgctgttcataagttgtggaaatggcaacggagcgacagaaatcctagcggcaagtctactgcatctgttgcacctcacctgtggcaacctgcaaatgggattctgatgacaaatgacacgaatgatggcaacccagaagaagcaaccgcctgcattgcattgtcaaaaaatgactcctatgttatgtctgcatctggtggcaaagtctcgttgttcaatatgatgacattcaaggtcatgactactttcatggcacctccacctgctgcaactttccttgcattccacccacaagataataatatcatcgccattggaatggaggactctaccatccaaatctacaatgtccgcattgatgatgtcaaaagtaagctcaagggacatcagaagaagattacggggctggccttttctcaatcaatgaacgtgctagtatcatcaggtgctgatgctcagctatgtgtgtggagtattgatggctgggaaaaaaagaaatcaagatatatccaacccccagcaaaccgacctggcactttggttggtgacacaagggtgcagtttcacaatgaccaaacacatcttttggtcgtccatgagagccagttgggaatctatgatgggaatcttgactgtttgcgcttgtggtctccaagagatgcactcccagctccgatatcgagtgcgatatactcgtgcgacggtctcttggtttacgctgggttctgcgatggtgctatcggagtcttcgaagcagaatctcttaggctgcgctgccggattgctccttccgcttacattccaccttcaatactagcctgtgctggacgggtctacccgttggtagtcgctgcacaccccatggagcctaaccagatcgcgatcggcatgagcgacggcaaggtccatgtggtggagccattagacggggacccgaagtggggatcggcacctccacaggacaatggagcgcacccgcacccgcatccagcgatatcagcggcaccgtcgaccgccaccaaccaggcatctgatcagccaacaaggtgactctggcctgcagcactggaggagattcgttagcgcagagactggtaggacctgtaggagatagggagaaaaggtaaacgattagatgacgagaggatgatgctatatttatcaagtccgcagcgccctgcctctcttgtgacggcccgcgacacaagtgtggtgattgacagtgacatcgctcactctaagttaggttttggttcttccctggcccccggaaatcatcacctggcgccgccacattcgaatggagatggatctgctggcatcatcttgcttcctcttttgtaaagcttttcctgctgagtttagtggtaccttagattgtcgtccatttctgccctgttctccgggcagctatttgtagtgtaaaaatatggtggcgtgctggatggtgttatttatgcgtgcgtggcctgtcatgacgaattccaccatgtttggggctatttgatggatgtttactgatcatggctcgaaattatttttttcttcgtgccatttgcaattgtagaccgtggacgcggtgtgagttgatgagatttgctggtgagctgtttctggaaaaaaagggggggcccggtaccca

SEQ ID NO: 5502 - DNA, 1620 bp, Zea mays
attgggacctcgagccggcgaagccacttggcgcacgcgctgacgcgcacccgcaccagcctctagtcggccagtcgggacgaagcctctcgaacgagcgaggccacgaggtgcccgccgcgcccagccggcctcgccgaccgggcccgccggcccctatataggcaggcgccacttcctcctcgcaaccaccagacgccagtccaccaccgcttcccgtgcagcgccctccctctacgttcccccatttcctgtgttggcggcgatggcgcggcacttcgtgctcaacaccggcgccaagatcccctccgtggggctcggcacctggcagtctgaccccggcgtcgttggcaacgctgtctacgccgccgtcaaggcgggttaccgacatatcgattgtgccagagtttacggcaacgaaaaggagattggtttggcgctgaagaagctatttgaagagggtgtagtgaagcgagaagatctgtttatcacctctaagctatggaatgatcatcatgctcctgaagatgtgcctgaggcactaaatgacagcctgaatgatttgcagcttgagtacctggatctttatcttatccattggccatttagagtcaagaagggaacaaataccagccctgaaaattttgttacacctgacttccctgctacttggggggcaatggaaaagttatatgatgctggcaaagctcgcgctattggtgtgagtaacttctcctcaaagaaattgggtgacttgcttgctgtagctcgtgtacctccagctgttgatcaggtggaatgtcatcctggttggcagcaaactaagctccatagcttttgtcagtcaactggtgttcatctaactgcttactcaccactaggttcacctggtacaacttggatgaatggtaatgtccttaaagaaccaataatcatctcaatagctgagaaactcgggaaaacttctgcacaagtggctctgcgctggaacattcagatgggtcacagtgttcttccaaagagcacgaatgaagaaaggataaagcaaaaccttgatgtttatgattggtcaattccagatgacttgcttgcaaagttctctgagattaagcaggctaggctacttagaggcaacttcattgtgaatccagagagcgtttacaagacccatgaggagctctgggatggtgaactttaggaaggacgccgttgtccgtcctgactcctgagcagggagcaagcagcgttccattagggcccgtcagatcatttcacctccaaagttgctcttttgaaatgaaggttcagtgctcggaagctctggtgccatcctgtatcacgaactattgagaaatttatcggtgattttactttgtgctacgggatgtgctgctgcagtctatcctagtgtcagttgatttttctggtaaaactgtgaccaaataagttaattcgccaggcatcattactattggaatttcatcgttttatctcctcactattttttatgctccatgtattctctatgatgagaccatgttgagtagttcactcatataatcacataaaacactgttttacattatcaacagagtaagctgctgaacgtgctaagtgccg

SEQ ID NO: 5503 - DNA, 2284 bp, Zea mays
aagcaaaatcatagaaatcttgttttaactcaaaaagagagagatcggattagtttttttttccctaaaatcatgctctacactacatcatacaagactgactactaatattgaacaagctaaataaatatgttctcagattccactaatgttacaagttacaacaacaagcacaccgtgcataaacatacagcaacttagaagatgctccaagtcctagccaacaaaggaaagggaaagaaaatgacttctaggttttcacgtctccttttggttgaccaagaagagatggtcggtagagtgaatggccttgtgccatctcaattctttcgcgtggatcatacattgtctcatctcttatagcctgaagaatcgaatcagcaggacggtccctcatgatcagaatcctatgtagtgcttttaggatcgggcacatctcaaccggcgcaacagatctgttggcttctggatgcatgacacttaagctatcctgactaagaagctcataaaacgcatcaactgcagagacaccctgaatggtcccttttcctttaatactgtcacccatttctaatgtcaattcacctttagctaacttctgcccataccatgcattacgacctttcaacaatgtgacataagtgtcagctaataagggtccagcaagtttttcaggttcttcttccagaaggtgtgtgatgtagatcatctcagatgtgcaaagtgcaaagtaaacagatttgctggttgcactctcgttggttagtgcagctaccataccagcaccaatagcatagacattttttaagccacccatgacttcatgagtgatgagatcactgttatcccacacaataaaatgaggctgcctcaaaaactttgcaaggggctttctccatttgtcagctccacaaatacgtgcatttgcatattctttgttgtaaatttcagaagcaatattaggtccgccaagataaagaatattctctgatggaactccagttgcattgctaatcatctgcgtgggagttatgatccgtgggagtggatccagcgaggcctcaattcctttggcgagggagatgatgatgggggcagtaatcctctccttccagtacctcctgatctccccgaacacctccctggtgtcggtggaaggcaggccgttgacgacaatgtcagcgtcccagacggcctcctgcaggttggtgacgaccttgagcgggcagagcggcgtgtcgatcatgttgaggcagaagccgtccctgagtatctcgtcggcgtagagcgtgcggtcgccgaggcgcgcctcgacgtacttgaggtaggcgcagcggcggatcaggcggcgcaggacgtcctcgcgcgcgttgatgacgtcgaagaggtgctcggcggtggcgcggtcgacggcgcggcccgggcggcgccagatgcggacctgcgccttgtcgcggaggtggccgtacgcgtcctgcagcagcgcgcagaagacgctgccccaggcgcccgccccgacgccgacgatccggagcgggtcgccgtccgccttccccagctgccgccgcagcaagtccagcttctcctccaccacggccccgttcgcatggccgtccggctggcccagcgcctccgccccgcccattgccctgatctcctccgcctcttcctctctcgccgaaagcaaggcaggctacataacccggtctgtctcgttcggcagaagaggagagacggggaaggctggattaagcgacggcagcaaagctataataactaactcggggagagagaaaggagcggacggcttttcttttggccgaaacgagctcggatcgacgcgaattcgggtgggtttggccgccgaatcgcagcgaggcgaagcgtcggccgcgacggccggagagcccgagggagtcggggcttgctgccggcccgccggccctgtcgcggttgccggttgggttggtgcgccagtacacgtcgcctcgggctctcgatcagctcggccagattggcgcctgctgcccagtgccccacgaggtagagagaacagtgacgcggtcgtgcgaaagcgagttgggccacgtacgggggagatgtggcattgtggcaggtaggtgagaagggggcggggcacgggcgggggttggtggtgtagagtgtagaccggttcgaggattttgaagcttcgatggatcacgatcaccatggtggatgacgtcggcagattctgacttgtgagcttcgcccagggcccaggcccagctaccggcgccagggg

SEQ ID NO: 5504 - DNA, 1363 bp, Zea mays
cggacgtgtgggtttccagggtcgcccgcgtgcttgacgcgtaactgtcgtctaactgtgatggaaagtacagtactgtacgtaacaacaactgctctggatggaaacacaagcaggagctgctggaggagctgggcgtgtacatggtggcgttcgaccgggccgggtacggcgagagcgacccggacccgcggcggtcgccggagagcgcggcgctggacatccaggacctggccgacgcgctgggtctgggtgacaagttccacctcgtctgctcctccctcggttcccacgccggctgggccgccgtcaggtacatcccgcacaggctggcggggctggcaatgatggcgccggtcatcaactaccgctggcgcgggctgccgcgggggctggcccggcagctctacgggaggcagccggtcggcgaccagtggtcgctccgggtcgcctactacgcgccgtggctgctgcactggtggatgagccagccgtggctgcccacctccaccgtcgtcgacggctccgcgcccttccccaacgcgctggacgagaagaaccgcgtcatggcgctctccaacggcatgttccactcggttcgtctcgcctcgctcggttgccctgccttagttagcttctctctgtctcccaccacaatgaaacggacttcgatctttctttcttgcagagggcgaggctggcgacgcagcagggcgtacaggagtccttctaccgcgacatgacggtcatgttcgggaggtggacggacttcgagccgacggacctcgagaagccgccgtttccggtgcacctgttccagggtgacgaggacggcgtcgtgcccgtgcagctgcagcggcacatatgcaataagctcggctgggtcagctaccacgagctccccggagctgggcacttcttgtcagcggtgccaggactcggcgacaggatcctcagcacgctcctgtcctcgccggcgtcggcgtgactgatccacgactcgcacctagcaagtactagactactagtacatgactgatgttgctgtagctatctctccaaagcattgctggtcgctgaagaaaagcactttatatgagcttagactatctctagcagatttattatcacatctcatatctcactctctatttcaaactccattgtacaaacagtacaatctacagtacaaaacaatatttttcccaacgttctggatatggccttagcccctactggtgttgtaccaagaaaccgacgagaaggcacttttatactccctccaatccaaaatagtagtcgttttagctctaaatcatactcaatatcgcatttcttatttcaaactagtctataaacagaa

SEQ ID NO: 5505 - DNA, 896 bp, Zea mays
  misc_feature (4)..(4): n is a, c, g, or t
  misc_feature (32)..(32): n is a, c, g, or t
  misc_feature (37)..(37): n is a, c, g, or t
  misc_feature (42)..(42): n is a, c, g, or t
ctanagttgattactggccgtagggctattgncagcnccagnccacatggagaacaaaatcttgtctcatgggcacgtcctctgtttaacgacagaagaaagctccctaagatggctgacccgaggctggaagggcgataccccatgcgtgggctttaccaagcccttgcagtggcttcgatgtgcattcagtcggaggctgcttcacgcccactgattgcagatgtcgtgactgctctgtcctacttggcatcccagccatatgatcccaacgcagctcttgcttcaaggaagccaggcggcgatcagcgaagcaagcctggcgagaacggcagggcagtttccaggaatgatgaaactggaagctccggccacaaaacacctgccaaggaccgagaggactcacccagggacctcccagcgatcctgaacaaggaccttgaccgggagcgcatggtggccgaggcgaagatgtggggcgaccgggagcgcatggtggccgaggctaagatgtggggcgaccgagagcgcatggtggctgaggcgaagatgtggggtgaaaattggcgtgacaagcggcgtgcagagattgggcaggggagcctggattcggttactgggaacagctagggggcaattaagcgaacagaaacgtgacatccacccatgcatttcgtttgtttatttccaggtccattttcgttctggcggcggtcggcaggccccagggttgtacatttctaggtcagggaagagtgggaaagcggcagcgttgtactggacagtgaatgcatgtggttgtacatgtaaattctcagaaaagttttgtgagaatgaaaggacatatttgagttccaaaaaaaaaaaaaaaaaaaaacaagagaaaaactcgagag

SEQ ID NO: 5506 - DNA, 2518 bp, Zea mays
cgccttggtttcaatgacgggacatgtcgacaggatggggtgggacgaccccttagataagattgtttggttcagggttaaaggttaagagttgagacatgactattccagcttgtcccctgttatccctcaaaattggagggacgagaggggacactgaaggatgtggatgccccggctgtccacagctgtcctgcaaccaaacatggatggttatttgtgtaactttcatgaatttgcaaatagaatatggggtcccaatacaacaacatagccttttgtcccaagcacaagcagggtagtctatttccatagaatggctaagtagaggttggctcgccaagcctaacacccccttcctcctttacgagggcttgggatttgctgctatgttgagacaagctcagcatagacggagttgggggatcctaatataaataagaatatgggagcttgagtgttgacaatagggacgctgttaattatccccttccaatggaagttggtagctatattttgtatgtattactccctcagttccaaattaaaattcgttttacctttttactagattcatacaataattaatgtatatgttatgtctaggtttatgatcatctatatgaatatggatataaaaatctagagctaaaacgactactattttgggacggagggagtattatgtaataatttgtcatattttttcctgacgagatgactaatctagtttgtctatgtttattttagtcaaacaagtgatagcggcggctatgctaccttggagacagagcaacctgggagcctaacgcccatgcttggggacaaaaaggttggcctgtgacccccctgttgtattctgtaattattactttgtttaatgagggacaatgacatatgtattcagagatctgatgttgactggtttttcggcagcccattattggcccggaaaagatgagagaggctcaatctcgtaatcaaacaccatacctcattttaagtggcaatgcaaaaacaggtcaaacaagtgatagcggcggctatgctaccttggagacagagcaacctgggagcctaacgcccatgcttggggacaaaaaggtcgagcattttttgggcatcaaacgaagtgccaagcctggaagcttacctcctccagtcccaaagaaaccgaagaactgaacctggtggtagcactcagccaacgaagcaggctacaacgcatttactgtgaacagcaatcagcccacaagcttccacggctcaaccccccgccgccgcactagaaatgcaatatcctctgtatttcttctaagctgattacactaacattctggcatgttcgatggggttttgtaattcagtgatatacgtgtgcatccttgatctgccttgaacatgtaagtgatggaactaaatattgttctaacgacacaccgtttccgtttgaataaagtgtagttatgatgtgacggtttaaggttaaagcagctgtgttcaagagctacattcgttctgaaaatatagacggggcgcctggaaccaaaaaaaaaaaacggttttagaccatctacttttttgatccaatttatatggaaatttgtcaatatttatgacatcaaattgatatattaaaaatgtatttcatgacgaatacaatgttactccatgcgttctaaaataaaattcgttttacctttttagtggtataataattaatatatttattttatatgtgtctaaatttatcattatctatttaaacgtaaacgtaaaaagtctaaagctaaaacaattaatattttagaatggattgagtatttgatatcataggtattcttttgagatcgtctcaaaataaaatttgttttatctttttagtgatttgtacaataattaatatatttgttttatatatgtgtctaaatttatcattatttatttgaaaaaatatatataaaagataaaacgattaatattttgagacggagtgagtatttgatatcataggtattcttttgagatgagcctgctgggagttgggtatttcacagccctagcagcggccagaactcaaaattctcacaaacgaagggaactcaagttccttgtgcgctgattagggcgggacgaatattcgtggcaacccaagttccttgtgcgctgattagggttggacggatattcgtggcacgttcttggttgggttggatcagctcgttttaattttttttttcataatctgagttaatatctaagctcagtttgttcacctttcagcaaaagaaaattctatacatatcatttatacatgaatcggtgaaatatgtacatgtatgtgtgttgcccgtaacatacgggtttaactgattattaatatgcttgataaactgtgtctatgttaaattggtctgtacaactgtgcatataggttaaactaacgaacatgtgtgccgatttgtgacgaactcataagtgatgaactgtgataatttgatgttgaattaatatggtc

SEQ ID NO: 5507 - DNA, 2853 bp, Zea mays
  misc_feature (1173)..(1173): n is a, c, g, or t
  misc_feature (2836)..(2837): n is a, c, g, or t
accggccggacctgcccggcgtgcccgaacagagcgcctcaccgcgccgcacgccgccgtcggtcgccgaccccagtcaccggtccacgcccgcctccccctttctcctccgccctttcttgtgaccgccgccgcgggccctagcccgccgttccctctccggcgccccgctcccgcacccgcaccggatcagtccgggccgcgtggtcgcccccacctaccgcctcgggtccactcgctcgcggttgcgtgtcccgcggggtggcccctcgggcctcggcagctccggtttcgaatggggctctcgtcggccgccactggcgacggggtgcagctctgcgtgttcgacctccagagggggcaacaggagggccaggagctcgacaagatcctctacttctaccccgccgactgccccatcctgctccagctctctgtcatcggcctctgcgaggggatcgtcactttcactaggttgccttcgctctcactcatttttattgtgcagttggtcgcaatttgaaggtcttgatctgctcgtgctcctcgccaacaacagcagcagcatcttctgcgtttaggaaaagaattgcacccagctttctagagggctacaacagcatctaagcttatagcatcacttcagtatttcaaatccgtagattgctcgagtatgcaagtttgggtgaatcgattttgttgcatgtgatccagcttaggttttttcaagcaagaacaattctggacttgattagtttttttggcagcgggccaatggcgttggttcctaagttcacctgtatgacagtggcagatctagaaacatctagccttttaatagtaataacatttgtaattttgtatagtggtttattttcacatagtgttcacagttcacatattcatgtagatctctagacaactgcaaatactaatggatgattactcagactgacatgggggttaacatcagtaattggggcccttcataagcaacatctcttttgtggtcacattatgacttccgtttgctctttgatagtgtattctccccaaattgccatccaagtatttcctgactctatacttttgataattcatttattgcctaatattgctgggttccacatcttatttctcaatgttagttatatgcagaattttttcccccgnaagaggattgcgaggttatagattcagagaaacactcccatgttttttaccaagccgaaacggatatttggatggttctggttgtggaaaaaaacaaggaaaatgaattgacttggcgttgtggtgcactacaagggattcttaaagaggctcattctctctttgcaatgtttcatggaccaatccgaactttgcttcacaaacaacccagtgcagagcttgctcgtggtcacctccgcacatttcttacagattatttgagcgattttaatgttggaaagaagttacaatttccaacctaccgtgacagcctaaaggagaggggaacagtccaaatgcttacggtatcacgagaagtggcacttgacgttcagtcactcgccacagtacttggatcatgtcttggaaatgttacctgccaatcacttgtactatttgaagacctcttggtgtcaacgacactgcccccggatgatactttaaacctatatacatatgctgttctgaggttaactccgcgtgctttatattccaatgcaagttcttggtcctatttgcggaaaggaacttctgttagtgctggccaaacatcaagttcatcaaatggaacaactgcaggagaaaggcctctcctacgtgagaaattgtcaaagggaaaggatggctttgttgctgctgatttcacagctacagaagctcgttgtgctgtaccctcgactccaatactttggttccagcaggcagatgagtgcatgcacctatgcatttatcagcacaaaagtctcactatcttactgctggttcctgcttcctcagtgataaatggagaagagggcattactcatgtgaagaaggcgatccttgaaaatgcatcacagaagattgtcactgttgagcagaaattgacacgaggatggggaggagaaaatgcgtatcatgttagtggatatcgttatttgcttgttgatccggagagaagagtatcaagagcctccccacctgggaaagtcaccaccctagcaaaggattctctacttgccctcaacatgctaagacaagaagtagatctagagaagtcaagatacaagagaggcgacccttgtcatgataaggatttcgaagtatgtatcagaacaaaaaacaatgcgtgggttattgctaaaatcagtcaaggaagggagctttacatggctctagagaagggtggtgaaacgcttctatatgcatccacagctgtagagaaattcagcaacaggtactgtgagggagcattctctacagattagaagcaccagagggagatcttagcttttccatacattacctattatgtacatcctgtttttttcccagctgtatcgttgccccctattgttgagagactcggaccactctttgcgaagggaataaggagttcgtatcagttgtacagctgctctgctgtcgtgtgctatctgcaaaagaatagcctagtctgggaataacgcagagcgggatagagtttgtttgttcacttatgcccttccttaacgcagagcattgtgcgtgttttcattttgctgtaacagccggcgatttacctgcagactgggaaagtaacttagcgtttaatttggtattctgaaaaaaaaaaaaggaaacccggtacccaaaaaaaaaaaannaaaaaaaaaaaaaaaa

SEQ ID NO: 5508 - DNA, 2219 bp, Zea mays
ctttctgctgaaggaaaccatattgtttgctggatctttaaaaaggggaaccgaattcccgagagcgagcagcagggaatctctgctgaatccgtaggctccgaattggagctggaagtgtagtgatttcctgattggggacataaggcggggtttgtccctactccccagtgagctccacgcggtccctgctcttcttccagtcaaaattctgtacccttcggtgctgggatcaaggaactaggcgtgttgtcttgaactcttgattcctgcttcatggaaattgtatatgtttttctctgaattcaaaatcttccctattctcccaaagctttctgagtgcaggaagaagggcggcggcccgctcctccactgtgaacatgggttggttgtgtccaatatttaatggtccagtaaatagagtttcaagaggacactacaacgggaactcccatgaaggctattcaactcagcacactaaatcatatggtgtgcatggcaatgaggacgaagacatggatcatgctattgcattatccttatcagaggaagatcaaaggaagggaaaggccattgataccgggcatcatttagatgaagatgaacagattgcacaggctctgcaagaaaatattggtcataacctagctgaagatgaacagcttgcacgggctctgcaagaaagtatgaatgatggacctcctcgtcagcacattccagttgaagatgttaactcagaaagtactccagcaagcatcttgccctcaaatattttccgcacaagtggcttgagggtttgtgctggatgcagaagtccaattggccgcggtcggtttctcagttgtatggactctgtttggcatcccgagtgcttcaggtgttatgcttgtgatagaccaatatcagagtatgagtttgctgttcatgaaaaccatgcctaccacaggccctgctacaaggagcgtttccatcctaaatgtgatgtttgcagtagctttattcccacagataaaaatggcctcattgaataccgggcccatcctttctggatgcagaagtattgtccttcccctgaaaatgatggtacacctaggtgctgcagttgtgaacgaatggagccaaaggacagtcaatacataacattagatgatggccggagactctgcttggagtgtctgcatactgctattatggagaccaatgaatgccagccactgtacattgatattcaagaattttatgagggtatgaacatgaaagtagagcaacaagttcccttgcttttggttgagcgacaagctttaaatgaagccatggaagcagagaaatctgtgcaccaccttcctgaaacaagaggcctctgcctatctgaggagcagattgtcagaactatattgaaaggaccaattggaccaggcaacagaatcatagatatggtcacaggaccatacaaactcattagacggtgtgaagtgactgcaattcttatactgtacgggctgccaaggctgctaactggctcgattctggctcatgagatgatgcatgcttacctccgacttaaaggataccgaaccctgagtccagaggttgaagaaggcatctgtcaggttctagctcatctttggcttgagtcagaaatcacatcaggttctggtagcatgtcaaccacctcagatgcgtcatcgtcatcttcaacatcttcatcatcgaaaaagggcgcaaagacggaatttgaaaaaagacttggggagttcttcaagtaccaaattgaaacagattcttctgtcgcttatggagatgggtttcgagcaggcatgcgagccattgagcggtacggcttgagaagcacccttgatcatatcaagatgacggggtcttttccatgctgaagctggttttttttacctcggtttggatatgggtatacatattttttttggagaacttttggttcaggttatacatacgaaaagccgaacttctgtgtcgagaagaggcataaggatttagctatactgtccattgcaggaaaaaactgtttcccttttcaattataaaatttcacagtgcagacatgaaggtatgtggtctttagcttggccaaccttgtggaatgctgtcacagtgtcacttgatgcaaaagaaaattcgaatacatatgctttgctgtgcttgaaatgcaatggttggatgctatgctcttctttattgcgttc

SEQ ID NO: 5509 - DNA, 2437 bp, Zea mays
cgccgcgtcgtaagctcggaattcggctcgaggcgccgtgacgacgttagttaatcgtgctcactggtgctggaggcaagttctggggtgcctcggggcccgccgggttccctaacgttcatcagactggggatgtatcacttatgccggacgtatccgtcgagcttgtgtcaaacatgatggaagagggaaaaaaaccttctgttgcagccattcaaggtcttgcattgggtggtggcctagagttgactatgggttgtcatgctcggatatctactcctgaagctcaacttggattgccagagctaacccttggcatcatccctggatttggaggtacccagcgtttgccgaggcttgtaggtctacccaaagcaattgaaatgatgctgcaaagtaagttcattacggcaaaggaagggaaggaacgtggtttgattgatgccctttgctctcctgatgaattgataaagacatcacgtctttgggctctggaaattgctaattgccgtaaaccttggatgaggtctcttggcagaacagataggcttggaccactctctgaagctcgtgctgtgttaaatgcagcaagacagcaagcaatgaagatcgcaccaaacatgccacaaaaccaggcctgcctggatgtgatggaggaaggcatattatgtggaggccaagctggtgttttgaaggaggccatggttttcaaggagctggtgatagcaccaacatcaaaggctcttgtccatgttttctttgcacaacgttccacgacaaaggtgccaggtgtaactgatgttcaactgaaaccaaggccaattagaaaagttgctgttattggtggtggtctgatgggatctggaattgccacatcacttcttgttagcaacatttctgttgtgctcaaggaagtaaaccctcagtttctgcaaaggggagagaaaacaatagcaggtaatcttgagggcctggtcaaaagaggttcactaacaaaggataggatgcacaaggccatggcccttctcaagggtgctttggattattcagatttcaaggatgttgatatggttattgaggctgttattgagaagattcctttgaagcaatcaatatttgctgacattgagaaaatctgtccaaaacattgcatacttgcaacaaacacatccaccattgatttgaatgttgttggcaagaagacaaattctcaagatagaattataggggctcactttttcagccctgctcatattatgcccttgcttgaaattgttcggacggagaagacatcaccacaagctatccttgatctcatcaccattgggaagataataaagaaagtccctattgtggtcggcaactgcacaggatttgcagtcaaccgtacattttttccttacacacagggttctcatcttctagttagtcttggtattgatgttttcagaattgatcgagtaataagcacctttggcatgccaatgggaccttttcaactccaagatgtggctgggtatggagttgccttggcagtaaaggatatctacgctgatgcctttggagaaagaaatttggactctgaccttgtggatttgatggtaaaggatggacgacaaggaaaggtgaacggcaaaggttactacatttatgagaagggtgggaagccaaagccagatcctagtgttaagcatgttatcgaggagtaccgaaagcacgcaaacacaatgcctggtggaaagcctgttactttaacggatcaagatattttggagatgattttcttcccagttgtgaatgaggcatgcagggttatggatgaaaatgttgtaattcgagcttctgatcttgatattgcttctgttcttggaatgggctttcctaaatacaggggtggtcttgtcttctgggctgacactgttggagcaccttacatacattctaagctaagcaagtgggctgaaatttatggccccttcttcaaaccatcatcatatttggaacagcgagctaagagtggtgtaccattgagcgcaccaggagcttcgcagcaaggttcggcgaggtcacgcatgtgaggtgctgtccagcattgagcagaataatgcagaatacttgcgggatgagccattgacggctgcttcgctgatcaaaacacctccgtgaacacaaacatgaggcacagaagaaatgatgaaaaataaagggattgtaacagttttggtgcctttgactgtaactggcagagtttctggggacagagtggcatggattaattgcacctgatcactctgtatgtcgctgtcatgtgtgcaatgttcaatacgtacgtaataaagaatggaaatatatgccgcaaaaaaaaaaaaaaaaaaaacaaaaaccaaaaaaaaataaaataaaaaaaaaaaaagtactctgcgttgttaccactgct

SEQ ID NO: 5510 - DNA, 2997 bp, Zea mays
  misc_feature (68)..(68): n is a, c, g, or t
cgcgcgcgcccgcgcgggcgcgggggggcggggcggggccgggggggggggggggggggggggggggngggggtgggggggggccgggggggggggggggggctggctaggcccccccccccccccccccccccggaaaagatcccctgcagaggacatgagaaacggcgttgcagattccaaaacccatcagaaaacttctgtcttttctggacaaaaggttcgtgaagttttccaattaaaacgcggaacatattcagatcttactgctgccaagatttcagagatgatgcactctaatagcttagataatgcaccgacacagtcgcttattagtgttgttaatggtattttggatgaaagcatagaaaggaaaaagggagaaataccacatcgtgtagtttacttactgcggaaagtcgttcaagagattgagcaccgtctctgtattcaagcagagcacataagaagtcaaaatgttaccatcaagacaagagaacaaaagtactgttcaaaaattaaagcacttgaaatgttggtaaatggcacaaatgaagaaaaccagatggcaataaacaggcttcagatagtcaagaatgagaagtcacaaatcgaagagaaaaaagaactctgtgagaaagatgttcaacgattaatgaaagagaaagaatattccaaaagcatcataatgaacctaacaaaagatatggaagccatgaatagattgcatgagcagcaacttgagcaaattggaagaaaggcaaaggaaatggaggaacaattaaccaccagggtaaaagaagtagagtatctcttgctacaatcgaataagaaagttgaagaacttgagattgcttctaagctaaaatcacagttatgggatcagaaagagaacatttttcagagttacatggataatcaacaattagttatcaaggacataagaatattgtcacagtcatatgaaaatgatatgtatgcacttcaaatgcagtggagaaatgaaatctctaacttaggatctgggttaaaatgtttggttgatgccgctgaaaattatcataaagtcctgacagagaaccaaaagttatttaatgaagtgcaagaactaaaaggtaatataagagtatattgtcgtgttaggccatttctttccggtcaagataaaaagtccaccacaattgactacatgggggaaaatggtgagcttcttatatcaaatccatttaagcaagggaaggacggacatagaatgttcaagtttaataaagtgtttactccatttgcttcccaagctgaggttttttctgacatacaaccactgatccgatcagttctggatggattcaacgtttgtatttttgcatatggccagactggttctggcaaaacttacactatgagtgggcctaccacatcaaaacaagattggggtgtcaattatcgagctttaaatgatttgtttgatatttcactaagtaggagaaatgccttctcatatgaggtgggggtacaaatggttgagatatacaatgaacaagtccgtgatctgctatcaaatgatattgcacaaagaagacttgggatttggaacacttctcaacccaatgggcttgttgttccagatgcaagcttgcactcagttaagtcgacatctgatgtattagacttgatggagattggacaagcaaatagagcagttggttcaacagcgctaaatgaacgaagtagtcggtcacacagtattctaactgtacatgttcgagggatggatttgaagaatggatcaacctctaggggttgtttgcatcttattgatcttgctggtagtgagagggtagagaagtctgaagtaaccggcgatagattaaaagaagctcaatacattaacaaatcactctctgcgttaggtgatgttatttttgctttgtcacagaaaagtgcccatgtgccttatagaaacagcaagttaacacaagttcttcaaagttctttaggtggacaagcaaaaactctaatgtttgttcagataaatcctgatgttgagtcatattcagaaactataagtactttaaagtttgctgaaagggtgtctggagtagagttaggtgctgctagaagtaacaaggagggaaaagatataaaagagctattggaacaggttgcgtctttgaaagacacaattttgcgcaaagatatggaaatagagcagatccaggtcatcaaagacaaagtaaaatccccaaatttgttgttagatagaaatgtgcctggcttgacgaagactacagcaaaccaacctagccaactattatcaggcgaacgaatgcttaagtctagtgacagagttctatcggatcgtcagagttacggcgaggtgaatgtagatcctaaccaccatgtgatggatactgcaccagtgagcatagatgaagcaggatatgagaacaatgcatcggatgatggtttatcgggtgaaaccgagaatgataattcagctgctgagatgacagcggaacggctgcatagatttccatcaagaataagcaggttcactctcacaaagaacgggcagccatctatgtctagatcgaacccaaaggatgctaagactccaagcaatacgaaagctccatcgagccggttgacaggaggctcttcagccaggtctaaaagacggcagtagagcacgatcatgttgctcgttttgatgtgcattgtagttgaaatgtgaatttgatgggtagttgtaggaccgttttatgattgtaactttagaaaatgtcagacactgatggcagaatatttgagacatttgtttgatcatttgcttatgccgagcaaaacagcaaacaatgctcgattgtatgtgaaacactctgacctgtgaccatttgaatgtcggtgcgcctccggaagtccggagttgtgtatataccaccaaattaccggcctaaaaaaaaaaaaaaaaaacctcgagggggggcccggtaccca

SEQ ID NO: 5511 - DNA, 2102 bp, Zea mays
tttccccaactggggaaagggggatttttcaaaggcgataaattgggaacgccgggttttccagtcccgccgtttaaaacggcgcccaggaatgtaattccggcccctataggggccgattgggtaccgggccccccctcgagtttttttttttttttttttttgcgtgaaattgcatggcacagttattttctgacgccatcagcggcacagcacatgacaagatagtttaaagacctcaacaggttaaggtcagtatcataattccatgaccaggtaatgagcttcccctgctgctcatattgagctgcacaagtgcagcacaagatatggccgcatatttacactacaaaggtgcagctttgctaacagtaagttgtccactaatagtcaaatctgctcagtgcattacaaagccttgtttcactaatagtctgacaaaagtcgttgttcctgccagggatctgcacgaaccagaaaccatcaggaataagcatcgctgtctgagaaatatggcacaggcttcagactgaatgtttggcatagcctgtgatacagcctacagcttcagcacgagaccaaggggactgtgatcactggcagagatgtccggaagaatatatgaatcatgcactttttctgcgattgattcggacacaagaaagtaatccaggcgccaacctttgtttgtcttccgggcattatgtctgtacccccagtaactataggcaacaacattaggatgctgtttccgaaacgtatcaacgaaccctttggacaaaaaattggtcccaaatgattctctttcctcgtttgtgaagccagcacttctacgatttccagcagggtcatgtatatcaatctcctgatgcgcacaattaagatcaccggttagtatgacaggcttcgatttctccaattctttcatgtagttaccaagggatggatcccactctgtgaccctgtaagtcaatctttttagaccatcaccagagtttggtacataagcagttaacaggtagaagtcatcaaactctacagtcacaaccctcccttcagtatcatggtctgatataccaagcccatacttgatcgacagtggtttgactcttgaaattattgcagtgccagaatagccaagctttgacacactgcaagtccagaaactatttgtgtagccatcaagcaaagtgtccttaataacttcaatatccttctcctgcatttttgtttcttgtaagcaaagcacatcaaagtcctccctctgtgctaactgctgcacagagaagcctcttgatttgagcaatgctttcaatccattgacattccatgacataatcttcagagcccgtgtatccttgctaagaggtggaggcctcatagtcctagggttgtatggaatccagctggcttgtggtttcttatgcacgagtatagtccaaggctctgaatcatcatcaggacttaatccggcaactgtttccttctggacaacagtcttacttagcttgacattagtcaccgaaatttcctgacaagtggtgttcttgcttgatttttgttttgttctacttcttttcttgttaggtgtttcagaaataatctcagaactttctagtttttgttcaaccacaacagaagcaccaccttttcttttcaaaggtacttccaaggggctaaccagctcaacggatgactttccctcttcaccatttgcttccacggccatagaattcatcagtgctgatactaaatctttcttggtacctttcacagaaatacccctcctcctcgtgagctccctgagctccttgacagtcattgattggagctggctagggctgctgctcctccctcgctccatctccaaatcactttcagcagcatcttccttctctgtgagtggctgctcatctttcttgacctcactgttcttagaggcagctctacgtgaatatgtggcccgcattccgtccctcatggcgttgagattcactagtaccgttactcttgaactaaatttcacacttgagagcccactggtacactggcagaggcggaggagggaggcgccgcgcagcagcagcggcatcggtcgccgt

SEQ ID NO: 5512 - DNA, 1241 bp, Zea mays
tccgcccacgcgtccgcccacgcgtccggtcaacggtctcgagctacgcttctgccagcagtgcagcaggttccacaacctggccgaatttgaccagcaaaagaaaagctgtcgcaagcgtctagcaggccacaacgaacgccggagacggccacctcctggaccccttgcgtcacgatatggccgtctcgctgcaccgctcggtgaagagcccggcggcaggttcagaagcttcatgctggatttctcatacccaagggttccaagcgccatgagggatgggtttccagcggttcgacctggtggtgaaagggtgcctggcagcagtatccagtggcaagcagcgagcctagatcctcctccccctcaccatcagagcgcggcagcaggatacggtgcccactcgtacgggagcccgggtagctcgtcgtcgtcgtcgaggccaccggtgttccctgctggcccggagctccccccaggcggtggatgtctcgcaggagtccccacggactctagctgtgctctctctcttctgtcaactcagccatgggacgctgctggccacagcgccggccacggccacggccacggccacgccgcgtcactgcccgcaacagcaggcttcgacggcaaccccgtggccatggcgagtagctacatcgcgccgccaagcccctggaccgactcccgggcccacgaaggcgggcggcggaacgtgcctcaactgccacccgacgtccccctcggctacgtgcactctggcccaggcacccatcacggccagttctcaggtgagctcgagcttgccctgcagggaaacaggccagccccggcgccgcgcaatggccagggctccgcgggcgcgttcgaccaggccggcagcacgacggagtggtcgctctaggaggccaaataaaagcgcggcacatcgtcgtagccgcacagcgagatggagctggaagcctggctccgctagctagctgcatgcgctgtttgcttgcctagaggctagagcatccagtatgataataagcgaggaactagtgcagtgccggccaggagactgatttcttttgcgcttgtccatgaactcgtctgttgcgtctatgtacacctccatggtttgaactcgtcggggactttgctcgatgtgttgttattaatctcatgctcatccttccgctaatgttgcctggcggcatcgccaggaatcggttccaaggctaaaaaaaaaaagaaaa

SEQ ID NO: 5513 - DNA, 1007 bp, Zea mays
ttcggcacgagatcccttccttcactggcccgccgcggtcccgggaaaagtcagtcaactcagccaacaagcgctgctgctcgggcacgggtggtttgggaggccggacgcaacgtcgggatgcagtcgctgcaggacaaggcgtcggagtggagcggggtggcggccgccgatgcctttgccatcgacgacgtcaacatattcgagtccctcggcggcactccgcagccattcgtcgacctctccaccaatttctacaccagggtttatgaggacgaggaggagtggtttcgggagatattcggggggtccaagaaggaggatgccatccagaaccagtatgagttcctgatccagcgcatgggcggcccgcctctattctcccagaggagaggacaccctgcccttataggacgacaccgaccattcttggttacccaccgagctgcagagcggtggctacaccacatgcaacaagctttggacgcaactgaaagcatagatgtggactcaaaaacgaaaatgatgaacttctttaggcacactgcttacttccttgttgctggcaatgagatgacaaggcaacagggccatggagtagcctgcaaacatgcaacaagtaaaccagctgagtaaccattttagccgtggagctggtaaccattggaataattactgataagccttttatccagtgtgcctttatagcattccgtatacaatggagttgaaacaacctccacattcaaagaaacaatggcactgactctttgtaggctttatagccattcttgagcagagagtgtactcaaagtggatagttgtagcttctgccaatatgtttatccttcttcgtctcttgtgctcaagagttattcacagcagtttttcaaatttgacctcaccctagcaaggttaccacaccacatgttaaccatgccacacttatttaaggtcatatttgcttaattttcataagtttgggagccaaaaaaaaaaaaaaaaaa

SEQ ID NO: 5514 - DNA, 3826 bp, Zea mays
  misc_feature (591)..(591): n is a, c, g, or t
gatccccctgctgtagctgctctatcctctgtgctgactgctgagcaatctggatcttcagaatttctacgatccaaagctagcaacacagcatataagactggtagagctgcaccttccttttcaatttatcattcattaaagaatagcttggcaaatgtagggggcgaaggttcttactttctttggattctcaaatatgtattcttttccagtttatcattatttaggcattttgggttctctgatctgtattcctcgtttctctgaaatgtttttgtattgtctttgcaaattttagccctagaagtctatagtcatgtttatttgattttgttggtacacctttgccttttttatagttatgactaatgggatgcacatagatgaaggccactaccactttgctggcccatttatcgcttcaaagtttgacaccttggatcaatgcagatgtcgaccggattgtcataactccagctggcccatcaggcccatcttctcctcagtctgaagctggggagtccaatgtgtttcaccaggaaaaagatgctgcagcagatggggcaccgcctgacactgatggagcantggctgaggccggagaggaagaaacaacggaaaatgttggtgaagcgacatttagctatgaccgcttgatatccaaatccaccgatccagttcgtgggatagattacaaacgcagagaggtttgtgcctgcacccgtccccccagcatccttgaagtggtgaattttctctagtgagtagttatggagttttttttcttggttccttgtacccggaagtaaccacagcctttcgcctgcagctaaatcacttgcttctcttgtattgatgcatttggttccattggttctctttagacgactccttatcacatttgtccacacatatattcttttgttgctcgtttggccaagtatattcatgttgggagttaggcttacattgaaccttgctgggccaatcttgctgatccagttcgtgggattgattacaaacgcagagaggcatacttatcagatagtgaattccaaactgtttttggcatgaccaaggatgcattctaccgacagccaaattggaagcaagaactacagaagcgaaaagcagatcttttctaaagagaacaagccttgttaccagtggtctgctacagtatgcaatcctcttgtcgtgaatggtcggtcccatgagagttggtgtattaatatattgttggtcgtttctgaggacggtctactggtggctttgcacggttgtttcttttttggcaaccaattttataggtcaattcttttatttgtatatggcctgggttgtgctgcttgcgaggtcctaaaatgcttctttgttcttctttgtgaatgtccatatgtgtatatcattttctactcgccagtttgttacgtacgggcatttcctggcaggttcgtcattgcattgtcatctatatgtcttgcacacgaaatatttgtgctgtccgttttgctgttaatggttggcagttgtttgggatttgaacacttggctgaattccatcattttcgtgtggctgttggcgcatgcttgtcatttctaaatagaaaattagatttgtctagtgtctggatcagcagttgtagaaagtggaattagaccagattatgctcattgttatctcatgttttttatcacaaacaaacacgatcattctactggtaagcggttatttcatgtaccgcctggagccctggacacggcattcctgcccaccggcagtccggcatcagctcgagcacgtgcaagtgcgaggagacggccgggccaaaggccggggcggcggcgcgggaaccaggcggaggcggcagtactcatagcagaaccatacgaaaaagaagaaaaatccttcggattgtaatagaattttggattggggtttaaagtcgggtctataatacactatagtttagtttcctctgtcccaatttataattcgtttcactttttaatcttaagtttaatcactcgtcttattcaaaaagttgtgagaaagatttcattgtggttttatttattatcaaatatactttacaacatagattaacttttttttttcatttttttatgaatttttttaaataagatgagtggttaaacttaaggttaaaaaagtcaacgaagtatattttaaaactgagggggtagtatttatagtagacagatataagaacattgtatccaaaaacgaggtggagtgagataaacatagctgtatcagttctccgacgaacaggcaaacagcagctgcaatccccaactggcatcagatcaagtccactgtcttcttccatgccagtgcaaggctgcaagccccccgcgcccagccaatcgattaacataaaagataaaaaccaaactaagcaagcaaattggctcaaagatttaccaacgtagaaatctccagaggatcacaacaacccgataagcgtgcgtgatcagcagctgctggtgcagaatatgatgaaggcacatctactctctaccagcaactgatcatcaggtgaggtgacctagaggccgaggcactgcattgctggtgacgcaggtggaaaatggctggcggcagagaaggccaacggtaacgtccgagatctcctgagttgtagtttcatatctgaaatccaagatgaatatgctgctccaaatctaattcttttgagttgagtttgttccaaacagtctctaaataagttggatcttaccctgagttaagagcatatccaacagctcttaattgatttagctatcaatatcttagattagtacctctctgacaatatttgagatgtaaacaaagactattctccaacagccttttaaagatcccctgaataagaagttaactcccgtcttgcatggtgcacgcaattgaaatggcgcatgctcagctgcacctatggatgacaatccaaatgtttctttgggctcaattttaattaaaaaacgaatagaaataaagtctgaccctaatccttgaactgcacccgcgcatgcaccacaccaacgccgtccacctcgcatcgggcgcatgcagcaactaaaacggcgcacatctctttcctaacatgcatgggaaatggaaaaaaaaaatagataggggcgaccatggttggcctcaaatctgtacgtggaggctttggtttaagagcgtccaataatttagagcacggatactgagtttttatacttttatactcttaaactattgttttgggaatagtaattagaagcagctggagttgctcccaataaaaagtctaatgcggactacataacaatgaacgtgacactttggtaccaaatttaattaattaactgttttttggcaaaagtgtaacgtgacagtatggttgttgataccgcgtcttcactaccaggtaagtgtcggatctcagcaattagcatgcgtgcgatcctggcaattagctggccgtcgtacggccgcgttaggcggaagacatgcacgtccgggaaattaggtgcatggctaattgtgttcttttttttgtcggtgcaaaaatgtcaaacgctgtcatatcatgcatgcatcgtcccgtgcacgcaattatacatctaggctttagtttggccgcaaattagcccagggaagatttccctccacgtagttgagaacccaagtcctgtcatttctcaggataataatctcaagaaatatcatttgaataagatatttagttatttaggacttgtcggggatcataattaggggtaccctcaagacgcctaattctcaggggta

SEQ ID NO: 5515 - DNA, 2036 bp, Zea mays
gggaccctcgagtgggcccccgcggggcggcccggccggaattccgtccacagaagaagaatccttctcgacgccgcccccattcattcttggagggcaagaagaacgcgcagtccaaaagcgaaacaaggggaaggggcgaggcagccaaacgaatcccagcacctgcctctcctttgcttgcgcagatctagcgatggcggcgggcggtgagttggcgtggggggaggagcccgtggcgcggcgccggcctaagaccaagatcgtctgcacgctcggcccggcgtcgcgatccgtcgagatgatctcgcgcctgctgcgcgccgggatgtgcgtcgcgcgcttcaacttctcccatggctcccacgagtaccaccaggagacgctcgacaacctgcacgccgccatggagctcaccgggatcctctgcgccgttatgctcgacaccaagggtccagagattagaactggatttttgaaagatgggaagcctattcaattgataaaaggccaagaaatcacaatttctacagactatagcattcagggtgatgagaaaatgatatcaatgagctacaagaagcttgctgttgatctgaagccaggcagtgtcatattgtgtgctgatggtaccatcactcttactgttcttcactgtgataaagaacaaggcttggttcgctgccgctgtgagaacactttcaagcttggcgagaggaagaatgttaatcttccaggagttattgttgatctccccacactcacagacaaggacaaggaggacatccttaaatggggtgttccaaacaagattgacatgattgccttgtcatttgttcggaagggttcggatcttgtggaggttaggaaggtacttggtgagcatgccaagtccataatgctgatgtcaaaggttgagaatcaagagggagtagctaactttgatgatatcctggcaaactctgatgcttttatggtggcaagaggtgatttaggaatggaaattcctatagagaagattttctttgcacagaaggtgatgattttcaagtgcaatattcaaggcaagcctgttgtgactgcaacccagatgttggaatctatgatcaagtctcctcgccctactcgggcagaagcaacggatgttgcaaacgcagttcttgatggcacagactgtgttatgctcagtggtgagactgctgctggggcttatccagagttggcggtgcagactatggctaagatctgcctgcaagcagagtcttgcgtagaccatgctgctattttcaaatcaatcatggcttcagctccaattccaatgagtccattggagagccttgcatcatcagctgttcgcacagcaaactctgccagggcagcacttatcttggtcctgaccaggggaggaactactgctaggcttgtagccaagtataggccatccatgccgattctgtccgttgtggttcctgagctgaagacagactcgttcgactgggcctgcagtgacgagggtccggcaaggcacagcctcattgtgaggggtgtcatcccaatgctgagtgccgccactgccaaggcctttgacaacgaagccactgacgaagctattggttttgccattgaaaatgcgaagacgatggggctatgcaacaccgatcaatccgttgtggccctgcaccgcatcgggatttcatccgtcatcaagcttcttactgtgaagtaggggtccaagggtgagggacaccattttgcttggtgaatttttgtgaggctgcttacgcacatcagcgtatccacagcttttctgttgccaaagatacagactttgcgttctggtacaccttggtgttacaaggttgtgggaatttgtcgtttagatattagcgatttaaacagtttatcaactgctatagctaattaatttgcagctgtgctgcaactttatcgtactgaaaattttatgtttgtttcacaaaaaaaaaaaaaaaaaacccctaaaaaaaagtaaaaaaaaaaaaaaaaaaaaaaaaaaa

SEQ ID NO: 5516 - DNA, 3828 bp, Zea mays
aaggaatatactctcagcttcgatttacctcacattcacatataatccatgccatttgagcttctgtttcccttcacaataatataatggattatcctctgtatactaactctaatctgctgggaaacatatgattggcattgttactggtatactccagtcacgtggtcgacaagagggcatctctgattgtgcggcaaataatataaatatcatatctacgctttagataggaatggtgaatgttggtgggaaaatggatgacaagattgataggtgtgtagctccatgtacaacaacgtgaatgaattgtgcattgggtcaagtgtcaaattgttgacttgatgctttcatacttatatatgcattttttgtccaaaacaatgcttccaatggtaaacaactaaactggggggggggggttatatattgtattatgctttctcttttgcagtaaaaaggaatcttgttcataccctgtccagaatagtcttcacttaaataagattcactaaatgggtttatcaatatcttacaggtggtatttacttgactttgaacatggttcaatcatggatgattattgtggaggaaggtctggatacaactcagaattactgaagatcatggaagctaaccaatctccccctcgcaagcgaccgcggagagatcgaaaccgtgaaaaggcaccctcctcaaacaagactgaagtattgcaacaagagatctggagagattttcctgaagatctttttgaaactgtcattgcaaggcttccagttgctgcaatttttcgattccgcactgtctgccgaaagtggtcttctcttttgggctcagacagtttctctcatcagtactctgaagctccacgtgggctgccatggttctatacaatcacccatgagaacgcgaacaacaatgttgcaatgtatgatccttcgctgaagaaatggcaccacccatccgttcctctcactcctacaaagatagttattccagtggcatctgtgggtggccttgtatgtttattggatctgagccacaagaatttctacatttgcaaccctcttatgcaatcactcaaggagatcccaccaagatcagtccagggatggtcaagagtcgctgtagggatggtgttgaatggaagaagttctagtgatggctacaaagttatgtggtttggaaatgatgggacttttgaagtctatgactctacaaagaacatgtggtctcgccctggaacttttcctccaagcatcaaacttccacttgctctaaatttcaggtcacagcctgtggcggttggcagcacggtatacttcatgtgtgcagaaccagatggtgttttgtcatatgatgtaagcactgggatttggaggcaatttgccatcccactgccaccgcatctgaccgaccacacacttgccgagttccagggaagggttatgctggtgggtctgctgtgcaaaaatgcagcgacctgtgtctgcatttgggagttgcagaagatgactctcctctggaaggaggtggacagaatgccaaatatctggtgcttagagttctacggtaagcacatgaagatgacatgcctgggcaacagtggtttgctcatgctctccttgaaggcgaagcgtatgaaccgccttgttacatacaaccttctgaaaagggagtggcaaaaggttcctgattgcgtgctaccatacagccgcaaaaagcaatggatagcgtgtggcacagcatttgatccggtcccctgcgccttggcctgacatggaatttaccttctttgcccgagtaccataatactatagtgaattcgtatcattggcctatatttttagatctttctaatgttatgatgagctctgcaaaaccgcgttcactgtggtttgttttctatcacgctgacgcatttgaaccgtttcctttgatcacctgctgctacttgggtcactgctacatcaattgggcaagtcgacctgaatatgtttcattgaagtaaaaaacggaacgccaggtgtctgtatttggtcttggttttggtatgtaccgtcaacttgtaatctttctgaacttgcagtttcctgtccagaaccgagtttattatacaataaagaccgggatgttgacgttttgaatcggctgcatggagaggctccttcgtcctattaccatgaaaacacatgtacatgtacttctgtttcaggctgcctactatttatcaatttatgtgcctacttttgatgcctgaactatttgcttcaacttcgtatgattttaggcattctgaaacctacactagctcttccaggcattctgagatctacactagctcccgtgtcgaagtttaggtttcttatctatggtatcttaggatgcatatggtcgttttttttattacaaatgacacaaaatgaagtttaaaataggagatgagataagtaaggctgctagagatagcttgttatttattgagtgaaatttaaaataggagatgtgacgtggaagactgctggagatagtcttatatgtaatgtagatgcaacaaaatataggtatcatgcaaaaagatgcaacaaaatacaggtatcatgcaaaaaaacggacattgcaaaaaaaaaaaaaaagagtggctaatgtccagatctcttgtatcagcatcacgcagaaaaacagatatcgtcaggcatcttagaacacaaccacaagcagaaaaccaggcatcgacacacagggaagacaccctcggcaaacacaacttcactgcctgccgattctcatgaaactgccatttgcaaggcgtccagtactccagttcactgcctgccgaaagtggtctggtcttcggatttgggctcggacagtttccctcgtcagtactctgaagcccaacccgctcctggagcacagcacatgacagagatttcattcagaacaaaacgtactggtacactgggggatggttctataacatctcataggaggcaacctcaagtagtcaagtgccttgcagtttctatcacatcccttctctccgcctttcaaatcgacactgaagatgcctcgacagatggatcaccagattaagtgatcaactacacgaatgatggcgaattattgttacaaatgtacaaacatagcttaggccgttccagactagcagagataccacctctccagcattgtagtaccaacacgatcagttcagcagtgagaatgggaggtctctcatctgcacaagttactatgagcattcatcatattaatttgtttgagatcgcagcaggaaaatttgaatccatcaaccatccagaaagtgtaagtacttgaatacaagctgggtccaaaaaaaaaacctaaacatggtttctaacctgtggtacccattcttcagaacagccaatccgatcctctgatttgttcttttctcataacgagagaatgcctcgctcgtcatcggcatgccttttcttcttatctttcttaccagacgcttcggtttgcactgcaacatcctcaccatccgcgtcagatttcttctttttcttcttctttctcaccttctgaggcagccacagcaggctcctcgccctccttggacttctttttccttttcttctcaccatcagcttcagcagcaggactctcgtcgctttccttggacttctttttcttcttcttccgatcctcctgaccgccatcctcttcaggctctgctgatggtgcaaattcggcctcatgatgtttcctcttctttgaaagccaattctgacttgtttggtatttcttcggtggattgtccaagcaccagatcag

SEQ ID NO: 5517 - DNA, 2476 bp, Zea mays
gggcgccccgcgccccccgaccaaagccgggcatacgcccccaagtccaaaagccctctccgccccgctctcccactcgtaggtgttctccccgtctccgcccgcactcgctcgtccgcgcgcaggaaggttgacctgtcgagggccggcgagcccggtaagtaagagtgaaaatggatggaagtagtaaagggagtgggcattctgaagcattaaggaactacaacctgggaagaactttaggtatcggtacatttggaaaagtgaagattgcagagcataagcttactggacatagggttgctataaagatcatcaactgccgccaaatgagaaatatggaaatggaagagaaagcaaagagagaattcaagatattgaagttgttcattcacccccatatcattcggctttatgaggtcatatacacacctacagatatatatgttgtgatggaatattgtaagtatggcgagttatttgattacattgttgagaaaggcagattacaggaagatgaagctcgtcgaatcttccagcagatcatatctggcgtcgaatactgccatagaaacatggttgtccaccgtgacctaaagccggaaaacttgttacttgattcaaagtataatgtaaaacttgcggattttggtctgagcaatgtcatgcatgatggccattttctgaagactagctgtgggagtccgaactatgctgctccagaggtaatatctggtaaactatatgctggacctgaggtcgatgtatggagttgtggggtgattctttatgctcttctttgtggaactcttccatttgatgatgagaatattcccaatctgttcaaaaaaattaagggaggtatctacacacttccaagtcatttgtctgctttggccagggatttgatcccacgaatgcttgttgttgagcctatgaagagaatcacaattagggaaattcgggagcatcaatggttccagattcgccttccacgttacttggcagtgcctccaccagatacgacacaacaagccaaaatgattgatgaagatacacttcgagatgttgttaatatgggatttaacaagaaccatgtgtgtgaatcactgtgcagcagacttcaaaatgaggcaactgttgcatattatttactattggacaatcggtttagagcaactagtggctatcttggggcagattatcaagaatcaatggacaggaatttaaatcagctggcgtcatctgaatcatctagttctggtacgaggaattatgttccaggaagcagtgatcctcatagcagtggtttgcggccatattatcctgttgaaagaaaatgggcgcttggacttcagtctcgggcccaccctcgtgaaataatggttgaggtcttaaaagcacttcaagaattaaacgtcagatggaagaagaatgggcactacaacgtgaaatgcagatggtgcccagggtttcctgaagttaatgacacgttagatgccagcaacagctttcttggtgactctaccatcatggataatgatgatgcaaatgggaggctacctactgtgatcaagtttgaattccagctttacaagacgaaggacgacaagtacctcctagatatgcagagagttactggacctcagctgctcttccttgacttctgtgcggccttccttaccaagcttagggttctatagtggtctaccatgtgcaaattttcactgtggtgatgaataaccgaaagcatgtaaataggaaccttgttctcgtattttggacaacgaacatgtttgagtgactggtcttgtgttgagcgcctaaaggtcatgtatacttaggttagtactatttccgttcttaaatatttgtcgcctgctagtgatagttcatttttgaactaatacgttacgaataaaaaaagagtatattactgtctgcatggacatggctgtttcagtaggccgtggcaccgcagatggcgatgctcactgcaacctattatgaaaaaaaatgccagaggccgcccgccgtctacttgcgcctttgtgaatcctattttttaaaggatttctatttttctaaggaaaattagtttatttttctttggtaaaataggaatcttctagaaaaatgtagttaccaaaccgacccttaatgtacatatctaatgtgttgcaaacttgcacttatggtgtaaatccttatggatcttgctacttcaaataaacatgatatgtctgttgccgacttctttcacaagatcacatggctcatcatcgagctcgtcggatgcccctctgcaatgagaaggtccccgcctatttgttggtggggttcggactcactatgactctatgcatcacctctatgacaatgaagaccgagcctctctctcgacgatatgttcgcacacatgattgtgtttgaggcttgccaactccaacacgtagttgaattgcagggggatcct

SEQ ID NO: 5518 - DNA, 2098 bp, Zea mays
  misc_feature (16)..(21): n is a, c, g, or t
  misc_feature (27)..(28): n is a, c, g, or t
  misc_feature (30)..(30): n is a, c, g, or t
gcacgagaccattacnnnnnncatccnnancaaaaaccagcccgacccaccaccaccatcgccaccattaccctctcgcccctgcctctccggccgccagcccatcccgtccccgtcccatgccgcagcgcgcagcggccgcactgacacaccagtgagcgagcagagcgagagcgaggcctgatgcggcagcggcagcaaggcgaggagcaccgggagatattcgtccagtggagaccctgcgacaagaagaggtcttaggccctccgccgccacgcgcaccggcagacaaatccgcgcaggccttcttccgacccgcaaaggcgccgcctttttcgccgattccacaggccggagcccggggagaaaggcagacagacagaccggaagatgagcgcgtccgtgggccggacccgcgtggggcggtacgagctcggccggaccctcggcgaaggcaccttcgccaaggtcaagttcgcccggaacgtcgagaccggagagaatgtcgccatcaagatcctcgacaaggagaaggtcctcaagcacaagatgatcgcccagatcaagcgggagatctcgaccatgaagctcatcaggcaccccaacgtcatccggatgtatgaggtgatggccagcaagacaaagatatacatcgtcatggagctcgtcaccggtggcgaactcttcgacaaaatcgcctcgcgtggaaggctgaaagaggatgacgcaaggaagtacttccagcagctgatcaacgctgtcgattactgccatagccgaggcgtctaccaccgcgatctcaagcctgaaaatctcctgcttgatgctagcggcacgctcaaggtttcggattttggactgagcgcactatctcaacaagtccgagaggatggtctgctgcacacaacctgtggaactcccaactatgttgctcccgaggttataaacaataagggctatgatggagctaaggctgatctgtggtcatgtggagtgattctctttgtcctcatggcggggtacctcccatttgaagattcgaacctgatgtcgctctacaagaagatcttcaaagcggatttcagttgcccgtcctggttctccacaagcgcaaagaagctcatcaagaagatacttgaacctaatgctaacaatagaataactattgcagagctcattaacaacgagtggttcaagaaggggtatcagcctcccagatttgaaacagcagatgttaatctggatgacgtgaactccatcttcgatgaatccggggagccagcacagcttgttgttgagaggagagaagaaaggccatcagtgatgaacgctttcgagttaatctctacgtctcagggcctcaatctcgggacgctcttcgagaagcaaacgggttctgttaagcgagaaacaaggtttgcgtcaaggcttcctgcaaatgagatactgtcgaagatcgaagcagcagcgggacccatgggcttcaacgttcagaagcgcaactataagctgaagctgcaaggggagaaccctggaaggaaaggtcagctggccatcgcaacagaggttttcgaggtcacgccttccctgtacatggttgagctgcgcaagtccaacggcgacacccttgaattccacaagttctaccacaacatctcaaatggactgaaggacgtgatgtggaagccggagagcggcatcgtggaaggcgacgaggcgcggcaaaggaggtccccgtgatggggtctgcaaccaagttttagaagtagcgctgcagataactagtcatcagggagcctggcgggaactgagcctgtgactgcttcctgtttgtttggatgttttgtttttgtctaaggtgctttctgactaaagtatgctggataatgtgaatgaagaatgtgcagagttttcagcaaaaaaaaaaaaaaaaatgttctttaaaaaaaaaagtgttgcacgtggtggagagttgcccgttgctgacgaacttgctatcttgctagctagagcctagaggataaatatgaattcaaaatacgagtagaaatatcttaaagtctgataaattttgtagagaaaaatataaagatccaac

SEQ ID NO: 5519 - DNA, 2145 bp, Zea mays
ctactctcttctaaagaaggttctgctgctcttgacaagtttcataaagcgtccccatcagagtcttgctggtataggtattgctgcatttgttcgtttgatgagcagtgctggatctatgttcggggacctcgagccgccgggggggggtctgtcattgaaagaagctgccactgagacacttcctgatttcacttatgtttcatctggagcctaactggaaaatgtgccaacagaaaatggagtctctgctgacaatagagaggacgaatctgaaccagtagcggatgacaatgaagaatcctctagatcaaggaatctatactttacaattggtgatgccaaatgtcgagctgctgtacaactcctgttgattcaggctgtgatggaggtatataacatgtacagaggacagttatcagcacagaacacagtaatcctcttcgaagccttgcacactgttgccgcacatgctcacaaaataaacagtgatagtgatttgcgttccaagttgcaagagttgggctcgatgacacagatgcaggacccgccattgttacgccttgagaatgagtcgtaccagctgtgcctcagtatccttcagaacatatttctggacagctctcctgatcatggaagcacagaggtggtggagagtcaccttattggcttgtgcaaggaggtccttgaggtatacttgagcacagcaagaccttctcagccttccagtggcacacagccgctaggccattggcttatccctgttggttcatcgaagcgaagggaacttgcggcaagagcacctcttgttgtctcaaccctgcaagctatcagcggactaggtgactcagctttcgagaagaaccttcgccagttctttcctcttctcgctgggctcataagctgcgagcatggttctagtgaagtacaggtggccctgagtgatatgttcagcacttgggttggcccactcgttctccagtcctgctgatgctgaacatcatgttatacatagtagtatacatcccattgtgttcctcctttcctccattatgttatgttaatcttttagtcgctgggagttcataatgttgtgctgaactgatcatgcagatcaaattttcgttgacgttattttcttgttcgtatcgggaggagtgtatgtcactatagagaactgaattatgtacggtagtttagctaaaattgtgcccattctgttcctaatgtgctgatttctagatttttaggcatgttttgcatgcttttgctcagtagcgtttctcctttctggaattctggaatgtggtagggttggattataattcttgcgagttgggtgtgttaggctatctccttttatcttaccttctatcttaaactctattatgtaatcagtgcaatttatagtataaaactgtgttttgcacgtccatttacactggctgttggagatggccatagcggatatataaatttccatatattccaaacaataggcatatatgagtgttttgatcaaggaaaaattaataaaatatactgacttattatttatataatgtgttgttatttgctaaagaatcaatatctcatgcattttgaatataaatctgtatatgcaagtttgtgtgtgttggtcatggctttgcacaatttgacttcctatataaacaaaagatgcctattattttatgatggagagcgaattataatttttttagttgacattgatttatgttgattgttgattagcatcaaaaagtgatacaagtaacaagtgatcatctttcatcgtaaacaagttcaatatctcgctgtactctggatctagaagagagaacaaccaagagattctgtccaaagatgcgtatttaaaataagctctatggaggtttacaactgtacccacacgaagaccaaggacaaaccttcatactagtgcccgcaggtcgccgatgaacgggtttatcagatttatcgaaaaatctgtcatttttatcgttttgctttcagatggttttttagaaaactcaatttgcatagtataatacatagattatgtccaaatcatctaagtcgaaaaatacacatataatattatatatatatatcttatatcttatgtactaactattaagccag

SEQ ID NO: 5520 - DNA, 1130 bp, Zea mays
ttttttttttttttttatttttttttttttgatgagccagttccagtgatcgaactaaccaacacgataaccacaagactgcactgataatggatcatggatgtttcatcaaggaagctagaagcgcgcgctttattgccatgagcgcatcacaccagactagttatttacaaaactctgccacacggcggaacagagcgcccgatcgatcgggccggcggagacgacgaccacaacatcatcacgactaccacgctgctagtacttgcaactcctactgctactaccggctagtataatacacggaggcgcgcgcggggggaccaggacggccgccgctaatcaggcgctggccttgttgaccttcttgccggcaccggaagcggcggcgcgggctggcttgggcttgggctgcgcgggcgccggggccaccttcctcgctcgcttcgcgcgcaccttacgtgcctccctcgacggcgccgaggcagcggccgccggcttcttcttggccggcgcggcggccctcttgcgcttggccattcccgccgacgccttcttcttcgccttcgcggccgcggagggcttcctctcctcggcggcggcgagcttgaaggaagccttgaccttgacgaggcggcccttggcggcgaagccgcgcagctgcactgccagcaccttgcggtaattgggcgggagcacgtcccggtgcttctcccccatgtgcttggcgatcgcgtacgggctcgccccgaccttcccgccgtcctgcgacaggatcgcctccttgatcatctcgaaatagggcgggtggtgcagcccggcggacttgggcttcctgctccgcggcttcctcgccttcttctccttctcggcggcggggtcggccttcttcctctcgtcaccctcctcgtcgggcttcttcccctcctccggcttctccaccacctccttcgccgcttccggcgccggctcctcggagacggtgacgaccggagcaacttcctcagttacggttgccatgaccagaaatcagtgatcactctccgtcagtgtgcgtctgacgcaagcggttgctcctactcggtactcgctgtttttcgattaggatgttctaggtaatggtctcgtgc

SEQ ID NO: 5521 - DNA, 1973 bp, Zea mays
  misc_feature (1949)..(1949): n is a, c, g, or t
gcacgagaccattaccccgcgcggccggccggcgggacatccctcaaccggtatgtgtttcgtgccaactgctgtaggaagtaggatccagcagtctgcaaggtgtccaaagaaaacaacacggcaggagtgaagatctctgataggatgacttcagtgtctgaatcaacacttgtgctggcttcaggtgcatcaatgttaccgcatcctgcgaaggtacggacaggtggtgaagatgcatattttatagcttgtgatggctggtttggtgtagcagatggagttggtcagtggtcatttgaagggatcaatgccggactttatgccagagaactaatggatggctgcaaaaagatcgtggaagagacccaaggagctccggggatgagaaccgaggaagttcttgccaaggctgcagatgaagcacggtcccctggttcttccactgttttagttgctcactttgatggcaaggtccttcacgcatcaaacatcggagattctggattcctcgtgattaggaacggaggggtccataagaaatcaaacccaatgacttacggtttcaatttcccgttgcagattgagaagggcgacgaccctctaaaacttgtacagaaatacgccatctgtctacaagaaggcgacgtcgttgtaacagcgtcagacggtcttttcgacaacgtctacgaggaagaagtagcaggcatcgtctccaaatcattagaagctgatctgaagcccacggaaatggccgatttactggttgcccgagcgaaggaggtggggcggtgtgggtttggaaggagcccgttctcggactccgctctcgcggctgggtacctgggctactccggcggcaagctggatgatgtaacggttgttgtatcgattgttcggaaatctgaagtttaataaactagaaacgaactctcaaagttgagcgcacttcttatttttttcttcttctttttctcttcttgcaacagctgcactcgctggcaaaatgcccgtgagcatttcgcacgtccctggcctacgcgcccaggcgcattgcgaaacgtgtattgtgtacacttgatacatactataaggttgtataagtatatttgaacacggccctcagtaagctgcgagcccttcaaatgaacatcgtgatgtacttactcagcggcagcgaaatccatgaacagccgcaggttcaaaagcagtgctactaaaacgaaacggaaacgctcacaagatacatatctcggtacatgatttgtggtcagactgggggtaaggtggtacgggcggagcgcatgaactcgggtgagtgagcccagctcacaagatccggtacaccaacagagtcgcggcagcgaggaaggtgaaggcccgtggtggtgccgagaggccggcagcggcggaacgcgctggggagggcgctggagcgccgctggtctggctccgggttgctgccggtgatcccgaaggggttgacggcgacggcgtcggcgactgcccgaagtctggggccccggacgagggagccggaactgaaaccccggccccgtgccggcctcgaggttgtccccactcttttaagacgcaaaagacacgcgcaatttacataccaggagacgcgctgggcacaccaggaacagaaactgcatttaagggcgaggtcactcactcgtcagtcaaacgatcgatcgctcccaccgcgcgccatcacaaaaggcaaaagcgacgagagcgtaccgtggcacttgctgacgggcggcgtcttgaccttgcacgcggcgggcagctgcagggccctggtcatgttgagcgagaggccgaagtcctggccgccctggaagagctggcagaggcaggccacctccccgcgcaccacgtccctgagccccgagcagcaggacgggtcgggcgccgccgccgtgctcccctcctgcacgtancccaggcaccccgccagccccagc

SEQ ID NO: 5522 - DNA, 1781 bp, Zea mays
  misc_feature (1777)..(1777): n is a, c, g, or t
ttcaagcaaatgatatcgttctattgaccctcccgtaataaatcaagcaattccaaagctgaagatctgagtgatgtacaataaagatcaattttagtgaattttcatcaacattaaataagctgacattgcatagtaacgagtcttgactggtctaaaaagttccctttgcatcagtcaccactttggaattttcaaaataggcagggcagtaattgcagttacatatataagaccaactacatcgacttgcttgaccttctccaaaggatcggatcaactttggattacataggtatcactgaagttattaaatacttaggcatcacttggagttctttcgattgggtggtttactctggctgttcttccctcgtagaattgccatcgtcgggccaagggcgctgctcctgagggctctgtaagaccaagctgacgtactagcattttgtttccatgttgcccagccattttgcagaagatcaaccttatcactgggctcaccatttttttcccagaccgtactttctgactttcctagtgcgcgttcttcgcctttagtgttgtttgacaccaagggtgatttctggctctcaatattgccttcgtttttgtgcaaggtaactggccttccggccggtgctgatccaacttcgttgcatgtttcgatacccttcagtagccttacatcaacaagtgaagagtactcgatctccaaggagccatcttccttgtacggtgacaaatccacaagcatatctgactcgtccttgttttctttttcctcggtggtgattggatactcttgaacgggtacgagaatgatacgcaatgatacgggatcatataccagaacttttcccacacggtacgaagagagctccggacacaacatggaagacagctcaaccaatcggtaggcaatcagatctccctcctttggaagtcgtgttagggggtacaagctctcaaaattgaaaggttcgctagacttttcttcattagcaatattttgcacactggacatctcaatgttactgccttcattgttccttcgattattgacagcacaaaagccattttcagtaaccttaatgtccatgacatgattgttaacttctgtgctgcatccagctattcctgcatgatagccgatatcagcatttttcttgtttgagctattcattccccacttctggcccttctttttgctcattgttgcactccattggaacgtgccctgtaactcctttgctggcgatttgtcgggttctccacctgctggttcaaagcgaatgtgaccaggccgaaccacaactgggacaatctcatccgatgtatcagattcttcctcatctgctttgatgcttgaaaaatgaacatgtgatccattttgattgcttgatgggacaggcaagccatcttgattgcttgatgatggaaaatcaggagctattagtgaatcttcatgcacattcttatctgtttgtaattttcctctctgtctcatcagccttttaattttcttgcgacgagcacttctactctccaacttttttgtatcactttgagcattgtagtctgccacatttgcctcacatttcaattcggttttattgttcccctctgctttttgctgatccaccaaggtagtggtagtttcatgatttagagttgctttcttatcttcaatatcaataactgacaacttcaactttttagatccacgctgttcttccttgctgcggacgcgtggcgtccccccgggttttccggncctg

SEQ ID NO: 5523 - DNA, 2583 bp, Zea mays
  misc_feature (2009)..(2009): n is a, c, g, or t
ctcgacggccgccttggggccccccggggccggccgggaggcccaagcaaagcatccagcggagccacaccacaccacccttggtccggcactagcactagctatccagtggagacgaagatggcgacggcgcggtggctgcaggttgccgccatggcggtggcgctgctggcggagtgggcgacggcggcggcgcctcggaagcccgtggacgtgccgttccagaagaactacgtgccgacgtgggcgcaggaccacatccactacatcgacggcgggcgggaggtgcagctgtacctggacaagtccaccggcacgggcttccagacgcggggctcctacctcttcggccacttcagcatgcacatgaagctcgtcggcggcgactccgcgggcaccgtcacggccttctacctgtcgtcgcagaactcggagcacgacgagatcgacttcgagttcctgggcaaccggacggggcagccctacatcctgcagaccaacgtgttcaccggcggcaagggcgaccgcgagcagcggatctacctctggttcgaccccaccaaggagtaccactcctactccgtcctctggaacctctacatgatcgcgttcttcgtggacgacgtgccgatccgggtgttcaagaacacgagcgccgacctgggcgtgcggtacccgttcagccagccgatgaagctctactccagcctgtggaacgccgacgactgggcgacccgcggcgggcgcgagaagacggactggtccaacgcgcccttcgtcgcctcctaccgcggctttccacgtcgacggctgcgaggcctccgcggaggcgcgcttctgcgccacccagggcgcgcgctggtgggaccagccggagttcagggacctcgacgcgcgcagtgcctccatgtccatgtgcagcagagccagcctatgccctgccgcctgcccctgcacagtacactacgtacacgcttgtctgaaccctgcacaccaccaccatggccggccacgggagggcccgcccaataatctcttcctcctcgtacaccgtgcagcaccatcgcgcgcgtatcctacactacactttaattccggcctccactccagcccacggcaacggcactaactaatctgagggatctatctcccgccgctccgccaggttcttcgtggacgacgtgccgatccgggtgttcaagaacacgagcgccgacctgggcgtgcggtacccgttcagccagccgatgaagctctactccagcctgtggaacgccgacgactgggcgacccgcggcgggcgcgagaagacggactggtccaacgcgcccttcgtcgcctcctaccgcggcttccacgtcgacggctgcgaggcctccgcggaggcgcgcttctgcgccacccagggcgcgcgctggtgggaccagccggagttcagggacctcgacgccgcgcagtaccgccgcctggccgacgtcaggcgccgctacaccatctacaactactgcaccgatcgcgaccgctacggcgccgccgtgccgcccgagtgcgcccgcgaccgcgacgtctgatgatgatgcgttgggccggcaagctgcttgatcgagagcagcctgtaatgtatgtatggtatggtattgttgtgtgtcaggttcgtcgtcgtgggtctgcagagacacagagagagtccgatccggcgcgtacgtgtgcccgcgtgggcacatgcatacgtacatgcttgtgttgtactgtacgctcgtatctcctcacaccgaaatgaattgcgattaagtatcgaaatttcggcagcttatccatcatgtaatgagttcctctgcagtacttaaaactctcatcgtctcttgtctgtatatctatacaacttcttgctcgaagtagtccaaaaaaaaactcgacagtagattagcatctagtggtatgagagttttacgttcatagaaggttactgcagacgcgaactgcttgtctacttccacccatcctatctntcgtgtcatctcttttactttttaaacagtgtactccacaatcttattatgctatataaatattaaaaaaagaaatctaggtacaatttgatgcacatataaaactaatcaaaactgaaccgatagtgatgtttcatagaaaattaccaccaacggcagcgcttgcctactctatagtaggggtcataactgtaggagatagatagatatcccatgggtaatcgtcacatggacatgttccataggccgcttaattaaacataccctcgataagttgttcaccaagttgtgttattgggccgaagttcaggagaagcaggtactatcgggaggatgacacgctccgccagaagtaacacgccccgcatgcaaccggatagcggatcattcaacgtcaaactcgaagggaagcaaccatgcaccggaaaagagtcggcacgcaagaatagcgaaagtagataggcccagataaattttcacgatatgtaaatagatatctcccctgccggctataaaaggccgcggaggtaccctacaaaaatatccccctctctctcaccatcgcgcccaaagg

SEQ ID NO: 5524 - DNA, 1764 bp, Zea mays
ttgggtacctcgaggccggccggacgctccccaccacctcaaatttctgggcctctctcctccagcctgcatagccaacccttttgataaagaaacgggcctacactacacgggacacctgcctcctccccttctcccatctctccccctctccctctcgtggccacgactgccgctgccgccctacgccaggtgtccaggtcatctccggcccattcgccggcgacgagcaccccactagatcgaccgagatatggacggcctgtggcatctgggggacgagctccgcgggcagcccaaggtggtggaggaccgccagtggtcgctcatgacgtccaagctggcagagatcaccaggtccaggggcgagaggacgaacgacctcgactacgccaggatgaacgccgcccccgacgccaagcggtggggcaaggcggcgtcctaccagcaccatgacgagggcaggatggaccaccacgtcggcctcagcctcaagatgaacgatctcaagatgaacgaggccgccgctgccgccgtcatgaagctccccttccgcggcgtgccctacaacgtcaacccgatgtaccccaaggggagcaacgccaacgccaatgtcaacgcgttcaagatgaatgtcggggtgaacaagtactccagcagcgcgaacgggaaagacgccggcgggaaaagcagtggcggtggcagcaacaacaacagcggcggcggaggcaacggcaatgggaccgccaacggcagttccgcggtcgacaagcgcttcaagacgttgccgacgagcgagatgctgccgaagaacgaagtccttggtgggtacatctttgtctgcaacaacgataccatgcaggaggacctcaagaggcagctttttggattgccagcaagatatcgtgattcagtccgggcaattactcctggcctgcctcttttcctctataactacaccactcaccagcttcatggggtatttgaggctgccagtttcggtgggtctaatatcgatcccactgcatgggaggataagaagtgtaaaggtgaatctagattcccagcgcaggtgaggatccgcgttaggaagctctgcaagccgttggaagaggattccttcaggccagttttgcaccactatgatggcccaaagtttcgccttgagctctccatcgcggagaccctgtccctgctagacctatgcgagaaggaaggcatctgagctgttggctgcctcgtgaggttctagtaaatatcaatcatccttgtatgttctgtggatggtggttggcaatgttgtttatttttcaagcgcaagctgctgccggtctcgttttccctgtcctggatggaagcaaagggacctggtactttgaaggccccccctcaaacataagctgtgagcctgtcagtgcacgtgtccgccgttgtcgtcaagaaccaaaccaaatcatgaaatcttgcgccgacggagagttggagcgtgtatgttttgctatctctatctacatgtctcagtagagtggatataccctggggtccccaaaagatgggggcctgtatgtaacactacgtgtaatggttaaggtgaatgtgccgtgaggccccccaaaagttggagtgtgtatttttgttgtcaccttgaaccgactttgcgtatgctttttttagtgctgctaccttttgcgctgtgtttggcttctggttcatgtttttgtaatataaggtggcttgcgcaaaaaaaaaaaaaaaaaaaaaaaa

SEQ ID NO: 5525 - DNA, 1354 bp, Zea mays
ttttttttttttttttttatctaataatctatttgtatgttcaactcaacttaaagggcagccaacatattagagccaacaatttggagcaattgaccaaactattgaaaaataattgtttttgtgtgtgtggctagaagtagtagctggtcaaatccttggatgccaagaagaagaagaagaatagccttgtctagcaagaagaagatagagggatgatgtgattatacgcaaaatactaaaacctagggtggtagtacaagcagtagttatgagcaggcctcttctctttctttcctgttccgttctttttctttttccctgcggaattccccttcttccctagtgcctcgattcgatatttcgattggattggattaccaagggacagagggagggaatcccacacacacctctggccctcgcgaggccaagggaagggaagcactcagcacccagcagcagaaggaccgccgtaaatggcgctgccggtggcgaagctggggaccctggcgctgcggacgctgtccaagcccatcgccagccgcctcaagagccaggccgccgtccaccccaagttccgcaacttcatcatcgccatcgcccaggcaaaccaccagatcaccacaaagatacagaggcgcatttatgggcatgccacagatgtggcgatcaggcctttggatgagcagaaagctgttcaagctgctacagatctcatcggggaagcctttatcttctcggtcgctgttgctgctctaatttttgaggttcagagaaacgcaaggtctgaggctaggaaggaggaagctcgtagacaggaacttgaggaattgaaacgaagggaagagagtatagctaaagaattggaagatcttaaattgaagcttagtgaaattgagcagcttgctaaagggcgaggcctgacaggaatcttgaacttgaaacgggtccatggcacagaggtcggcaaggcagcagcacctctgcgtgagtaagcaatccggctttggcgcaggaaagtatgattccttgtcgcccccattatttggtaagacttgtgttgtcgtgctcaacctattctttggtgctcatattggatccacatttgtagtggttgatccatggacaccctgagacagtggtaataatacagcgtaacaaagaaatcaaattaaagcgcaatatgtatgtgctacttggtggcggtgaccacaaaatcagatgttaagatggattagggcttgtttggttgtatacttaaggtgtaaaaaatgccacgtttcagattaaagctggttgtttggactgttgcaactaaaaaaaaaaaaaaaaaaaagccaaaaaaaaaaaa

SEQ ID NO: 5526 - DNA, 743 bp, Zea mays
cccgcgggtcccgcggcgcgcccggccgcagattggcggcagcaaagcaacacgcgcctcgatcctcctcgcccctccggcctctcctcccctccctgcacccgcacctgcggagagcgccgcaagctagctgcagaggagcgagacagtagcaggaggaggacgagaggaagaagagatggcgggctgtgatggagccaagtcgtcggcgtccatggaggaagaggcatgcgcggagaagaagtacggagggatcgcacccaagaagcccttgatatccaaggaccacgagcgcgcctacttcgattctgcggactgggtgctgggcaagcaagccgcgaacagcagcagcagcacgaggaccgcagccgcggtcgagtctctgaagcccaagctgaagagaacgccgcaccaccagctgccgcctcgtaagcccacctgcgcttccagttgagacgcatggccacgcgtcgcagctgctggaggaggagctcggtcagagtcaaggactgaggatgccgacgagctcgagctcggataaatgttttagctggtccggaatcgtagggacgacgacgagccagaaagatccgaatccgagatgccgtctggcttcttggcgagcagcgcctgttattgtgtgccataaagaacggatcaattaattatcaattgtctggctgaattctgacaaaaaaaaaaaaaaaaagagccccaccaaaaaaaaaaaaaaaaaagcggcc

SEQ ID NO: 5527 - DNA, 1095 bp, Zea mays
  misc_feature (67)..(69): n is a, c, g, or t
  misc_feature (1081)..(1083): n is a, c, g, or t
  misc_feature (1091)..(1092): n is a, c, g, or t
ctcttatgacgaggataggtatagtatacgacacaaattgttctgagcttctaagcttggactatcnnntatggttccagtaagaacgatgcatggttttatcatgatagtgtagtggcccctaggggtgttgccacaccgttaattttcttccctgttgaggagggtggctagattgcttagtaagaacgatgcatggattcaaccaatttggggaaaatgagctcgttcacccctagtgtagcctatcatgcttcattatcttctgatcagtagttactgtgtgttttattatttcatacatattctttagtcacacttaatgttgggtgctaagtagttgcattaatattgggtgctaaaatctcaagtcaatttcttatgtcttcattcatgtgatgatactatcctagactaggtatagaagataagacactccaactataaaatccttgaagaaaaatggtgtaattactttgcacttaatttagatatcaaacttaacctggtatctacaatgtgtcactaaactctgtccaagctagaagtatgcagactgtcccttatccttcagtatttttttaatgtcgctcaagcaatttgatgttcaaatatggttaggattttgttggtaccactgggttttactgacttttgacccaatgcctcctttgaacatttttcagagtttatagagcagcacattccaaaagtgatacagaaaactcttgtgagtcaggtagtttcaggtgtcttccgcagactatcagaatcatatcatgtaagcaatcgagaaatggaacaatactctcccctttctctgatgtgagaaacagctctagtcaacaagaatatagtactagatcctcaccactgggttcatcaaagagtgcaagcaataggatgactgatccatcactgggtaaagtagattcattccacaaggaaaaggacatgatcaagattgaagaaagttgagttgcctctcactgttctcgtatgtccatctactggttttatctctagatactgacaaaaaagaccattttaaaactgcaggcttccttctggagctcgggtnnnatccaatnngca

SEQ ID NO: 5528 - DNA, 481 bp, Zea mays
cagattccttttctgatcagctatatcagctccatcatgacattaatggagggtgatgtgatactaacaggtagtgacattttctgaggttaaccagcttgtttttgcgcatctgaggtctttctgcgggcaatccattatttattttcgtctacaggtactcctgagggtgtgggtcctgtgcgagtaggtcagaagatcaaagctggtataactgacctaattgatgtcgagttcgatgttcagaggcgcaaccggtcattttccacatgatacaataagcaagaaagtaacggtaagcaacaaggattccgaacatatgagctggagctgatttttccaatacaacacataaggtagtaaaggcagcatgcttttatttgttgtgtgactaaaaataatatcagacaattgatttcgtaaaagcaaacctgttggtcaggtagatgatgaactaggtcagaacatcatgctgctattg

SEQ ID NO: 5529 - DNA, 400 bp, Zea mays
ctacaaatacgtttttgactgaaaatttactgctacacaaacccacggtgcacaatcaggaaatagtttgtcacttcaagttaatggtggctttttcatctgaatgctttggcctctagaatcactcttcgcgtatccataatcaccagtcactttcattaaaaggggtgattttctatctaattctgctatgcacctttttaagtaaaatgatattaggtgatcttttgttttggttatatcgatccaatttatcatcaatattaaatccacatgcctctaaaatagaggcaaacttttctatgtacaaagtgatcgatagtgttcttttcctataagtatatttatcctcttaagatgacatacagtctatatctgagctgaggctgctaggattaaa

SEQ ID NO: 5530 - DNA, 479 bp, Zea mays
aggattctgtttccagctttatgtaattggatttctgtaatggtccctttatttggtcttttatcatctttgttgctatatggtccacatctgttctatcgtatgaaagtattgcattggaagtattagtgatacactatctttagaatattaatgcatgtggcttctcaattgatctaatcgtgctgccaaaaattctcatgcattttttcacagtacacaaatgttacaagttgtaaaagctgattctaatttattgatgtgtgtgcagttcaagctttgcaaggttaggtctgttcagtttgggcagaagggcatcccttatctgaacacgtatgacggccgcaccatccgctaccctgaccccctcatcaaggccaacgacaccatcaagatcgatctggagaccaacaaaattgtggacttcatcaagtttgatgttggcaacgttgtcatggtgactggcggaaggaacactg

SEQ ID NO: 5531 - DNA, 1177 bp, Zea mays
  misc_feature (1147)..(1149): n is a, c, g, or t
  misc_feature (1159)..(1161): n is a, c, g, or t
  misc_feature (1168)..(1170): n is a, c, g, or t
attctatatatctaatgctgtgttcgcaatcatcagaggtcactgtctttgtccttatctttgtcacctttatctagaagccacatcatcttatctcgtccatttatgtgtttgaacaattgctgatgcggcttctatctattacacaggtcataaacgtgcccttgatgttacttctgttgtgcagggaaaggcgaggttctttagtgtcctgatgcttacatggggtatgcaacatataatctctgtttcgaaacaacagctgagaacataggccaccttcctcagagattgctctgtcattttctcttttgctgcagtgcaatttaattgacaaaactgaaaatggtctacgaactgcaggtctggtggctgatgttgatattgaatctgagaagtataggtggatgggaagtgctcgccttgatttttatgtatactctctacactaaaagcttatatcaagtagttgattttatttttttcatatctgtaagtttctctctctttttatataatggagttaacagagagatattggctgatcttgcactagcttggggcttggcagggtcgagacagatacagctctagctttactacttagttccaagccccaactgcaggaaatggctttttggttattgtaaatggtgtatagctttacttagatgtgcattcatgcattgtaacagccctagaagaaaagatcatagttatcatacctgaaaaaaatgaatcttctacggtattctggttgttagttcaaaataacatagattatataatctggacagattataatccaaaataaacatgaccttagtgttcataaatcataatagatgcagagcagagtataacgaaaccatattgcatatgctcaggcaccttttgtggctttatgttactctttctcagggtattttggatctatagtaggttgacacagtcccatgcctgccatgtgcaacgcaacttcttttcagcttctactccgcattctgaacctgcgacggtacaatgggcgtatcctttttgttccagcaccaggatacgaagaagttggtgatcctgtggaccaagctaccggttacgaaacaaacgggtttagcacgggatttcaagacgacggaagaaccggcannnaatggtgagnnngtgtggnnnatgtggc

SEQ ID NO: 5532 - DNA, 386 bp, Zea mays
cgaggaattccgcaagcagtatgttgagtcaaacaaggttagcacactaaagagattagggacccatgatggacggaaacttggccctgatgaggaccctccagtcatatcaagcagaagaccaagcagcatctatccattgtctgcctcaagcccgggagtggccactttagcttcaataccagcacctgtggtagctgctccagctgcagtctctgccaaagaggactcatttcctgttttggaagccccccagaccagcaagcgcaccaagtcaaaagcatctgatatctgtgcccagaccgagaacaactctgttatagtatcggaggcagaggctttggaacagactttgaaagagaaagctcgtctattggaggaacaaa

SEQ ID NO: 5533 - DNA, 1013 bp, Zea mays
  misc_feature (994)..(996): n is a, c, g, or t
tccacccccaaaatcactacccgctctgcggcgatggaagggaatcaaaacgcgtgcttcccccttccatcctcggcgttgcgcggattgcatggccatcgtttcgcgcccccaatccgtcgatgcaaggaacacgtgcttcccccttccatcctcgacgctgcgcgaattgcagattgcggattgcatggtcatcgtttcgccccagttcattgcccgcatcagatggaagggcgccccgatctgcctcacctccatgcaagtacctgatctgctgcgcccaatctcttgccgatttcttcctcatgcttcctcgtgtcctctccagtctcaccggttttccatggagattgttccagggttagttaaggttggtttgagctggagtcggtaggatttggggctgtccatagttacaggtttggtttctaggcttgtttgccctgttggtggttcatgttgcctgctttcttgcgctgctctccacgtccgcctccagacttgttacggttgcagaactcttgcacatagattctgctacgccagtccaagttaaggacatggtttttggcccagccttgtctgaattttaggttcgtttgagcttccattgctacgtcagttaaaaaggttcgtttttggcccagccttgtctgaactcttgcgctgaattttaggttcgtttttggctcttcttttctccctttttttatcaaatctattgcaattcaacagccatggtcgctggctacagagccaattaggttctcacttgagctctcgttcaaatgtgaagtattgatagtcacgccaatttatctccactttctgcatctaataaattccaagcatttttaccatctaaaaaaaccgaacctgcctgcctgttcttgtctcacaccacctgttaccagaatattattttgcatgaatcccttcctgattttgattctcagtttcccactgcatgcagcaatgaggtgtctgcctttcnnncatgagacgccaaagag

SEQ ID NO: 5534 - DNA, 1053 bp, Zea mays
tcgctcttggcgatagtcacatgtaaattttaatttgatggatcgttctgtatatatcatatcaaagtttccttttacatttcatttctgcgggattatagctgctttagttttagatcctccaaattatgtttcttcttttgtatcacatggataataaatttagcattggctactgttatcctaacgttgattcttgtttggcagatatctggctgagttgcttgcagagaggcagaaattggccccatttgtgcaagttcttcctttctgtaccaggctcttgaaccaaggtttgtttcctgtgcctccatgcattactaatgttgttaatctatataagttttttttcattagttcaaccattgcgattgttaatggcgcaacacactcactatcattagttgctatgcttagatttcccccaagtcttctaggttggggcacttaattgtatatctgtgtgaagttttgctggttgcctctgcacttttgtcttcttgggtttgctatatcatgtattttactatttgctgatcataaaatttcgttagagattttttttgtgaccgggttttgttgttcattcatttgtcatatatcccatcatcatattgatttttccttttttatggtgataaaaagataatactccattgaattatggctctaaagaataactcgtgttctcatagttgacaatggcttccatttatgtcaaccccaaggggctgctaacactctagtgcggctgctgtttatggcaacctatttttttatcttgtggatgatcactggctcactgcagctaatgcctatttttagcgaagtggagtgtttactatctcattggtacaatgcagttcatgtcattgtacaaatttagagatcccaggcaggttgcctttgccccggtttagagcggcatgcaaagtataaatgtcattattgtttctggcttaaatatgtatagttgtctaatactctaattgagttcttgttttatttaatgcagagattttgcgcgcatcttctatggcgcctaaccataac

SEQ ID NO: 5535 - DNA, 464 bp, Zea mays
cagacgatagcgcaagctccggtccatgtccgcgtgcacccaccggatcccgtctcacgttcttgctctgttttatgtgttttgcagctgcacaaggagccgacgctcgggttcaaggagctggagtggttcgccgacatcgacctcttccacgagcaggcgcccaaagccagcaggacgttggcggaggtgccggagcttttcggataccaggcggcgaacgacgcggcgtactacaggccggccaaagccgccggcggcggcggcgctggggttcgccagagcaagaaggcccggatcgaggtcaccgacgacgaggattacctcatagtccctgatcttggttaaataagagagcgcaggagttttgtttcttctcctgatgtgtacggtgtaccagagaagaattttactgtgtacaagctagtgtcaagtgttgtgcatctttgactgtagtgtcgcta

SEQ ID NO: 5536 - DNA, 360 bp, Zea mays
ggtggcgttggcgagcgccgcggggacggttcctgacaggcggttcccgtggaggttgagccggcgtagaaacgcgagcgacccaagctcggcggggatgtagccggacaggttcttgccggcgacggccacccctacgacgcgcagtccgtcgctggacgagctgttgacgcaggtgacgcccagccagcggcacgggtccgcatcagcgtcggaccacgacgagagagccatggacggatcgtcggtcaccgccgacttgaaggccagtaacgaaagcccatccgccgacagtgccgccgcaaacgccggcgccgtgagcaggagtaggatccccagcgagtttagcacactcattta

SEQ ID NO: 5537 - DNA, 1256 bp, Zea mays
  misc_feature (1219)..(1221): n is a, c, g, or t
  misc_feature (1235)..(1236): n is a, c, g, or t
gaaggtttgctattttgattgtccaaattagcagtactatgagcattcaattattgttgacttttaattttctatacatcttgagcatagtgggtcagtcaccgaaaccatcgagggaacatctgcggagttgatttcatatggcttttaaatcctgataagtgcaggaagcccctgaagaccagctggaatgaagctgtttttggtatcattaaggtaagtaacatggtcagcagtatatatcaccaagatatgcatcctattgctaatataaaatagaagttgaccttgaagtacatgttgttaacaacagatctatttattctggattcttatttaatcatcaccaggagctaagaatttaacttctgttaatttcagtacttcctccaagttgttgcattcctttccgaggagaatgcatttgcactcctgaaggcagacagcctttatgatcacatcacatattcaagtttctaccaggcattgtgtcaggtaccaacaacagctcatccttggtacactatactattgtcgacgacactggtgctgattttgaagtaaatgcagttaggaatggtccatcctgatagactaaaatcagaagaaattgaggagttgtggagtgaagctgaccgtgatggcgatggtgttattaactacaaagaatttcaggtaattccttgtgattgtttaagacaaatgttgaatcctgagttcttgaggagaggagttattttcgtgaaattggatccaacaaggacatttggaccataaaaaaagtagatgtcacaatagaatgcatgtttgggagaatataatgcattattctgataaaatgtggatataatctttaagtttcagaaaggtcagattttggtgaaatctcatcgaacaagtcatctgaatcctctataactacaagcattgcttatttttgctttgtatcaagaggacagttttttactttaattcaagatgtgtactgctctttctcggttataccatagatctgagtttccgtatataagcgaacagttgttctctgttaatattaattggcatagccctagcaaaaaagattgtggctaataagtcttcaaatctgaggtatgaaaccatggagtcattaaaattgttcaagtaattataacatatgcataaaaagtggaaatatcaagattataacaaaggaactaaatcacatttcttttcgaannngtggtaatctaacnngtgtttgtatatataaagca

SEQ ID NO: 5538 - DNA, 366 bp, Zea mays
ctgcggggtgcggctctcctccgccctcgccatgtgagggggagtccacaccacaggcagacgcacacacagctgctgagcctgagcgaagccgaagcgagcggctgcaggtgcggcggggccggtgggggagctctcagctcccggcttggtttggttggaatcggatctccttccttccttccttcctcgaatgcttctcgggcgtcgggccgagcggagtggcggcgatgcgtgcgatggagtgacacggaccgatggtggtgtggtgcatcggagcgagcgataaatgcgaggatccaaagccgctcttcttcttctttttttcccttcgcaaggaaatggagcagtggcagtactggtaca

SEQ ID NO: 5539 - DNA, 1237 bp, Zea mays
tagttttactttaataccattctgtttgatgcaacagcaacccttcatctattattttcacttttcatattttgttggttgtttaagttgtctgccttgtttctggtacacctaactattttctgccatcttaatatgttaatttgtcagaaagattggatcaggacatcagtgggattttggcaactacttgtgatcactctttccgttgctcatgtgtttcagtgtggaccaattcatcctgtccggtaatgaatggttgctttgctctttcatcatttaccctagggcagtaaacaatcagaacatggactcattttggcgtttattattttcttagtatgatatgtacattgcattgaatttgcaataacaagtacttcacttaaatttatagctgtgttatttgcataatcttcttggtgactagtgaatttctggtgtgcttgctattctttataacacttggaactatatagtaatttcaacataaagccttttcaaatgtctcagcgcttgttaatttgatattctgggcacacaataggaacttacccagaggcatgggcatatacataataattattgctgaattcaataaatgtctacatgtatatcttcaaagtaagtggactgcaaggaaaaatattgagtttggtcatgttaaccacgtgagtcataggtacattataataaggaaatgcttgcttatgttctccaatttattattgccagtactttattgagcatgagtggggcatttaccaatagttgtttgcatttcaggtatgccagttttgtcagaagcagtctgaaaattctacatgttctgtttgccaaaccactggaaacctctggatatgtgtgatatgtggttttgttggatgcggacggtatgtcattactgacttactcccgtcagtcagtaaaagctgatgttttcagacaagaaaaacaagctacatgcaagtcacatttcttgtctgaaagttaactatagttggctgtatatattaatattttctggtgtaagtcagtaatcagttatcactgccatgttaagggtgttcatatgaatgtatttgatatacatggttacgtagtccaagttaagattgctgcatggaaaacatttgtttatgatgatgcggacattagttattaccagaagaaataaatacacagcttggtatttgttgaatttttctacgtggccaatcaaccttacccttatgac

SEQ ID NO: 5540 - DNA, 375 bp, Zea mays
aggatctgagtgcccaacgtccagtgttaaggacgcatgtgccctcagacacctaggttatccccggaatattcccataaagcggggttacataccgtaattacagggagacctttacaaattaggcctgtaatacgcagcggccacgcaaggcctgttacaatgggccggatcacacgtgggcctccatgctggacgaggtcgcaagatgaaacgaactcgtcacaggtcttcgtccggtgacgtatgggacgaagggtctgcccgttgtcttgtctccgttggtgcagcgaggacggcgaaggcatcgagcgaagggtgacgtcttcgccttcgtcccaacacagacgtcgctgccgaattaggttcattcat

SEQ ID NO: 5541 - DNA, 790 bp, Zea mays
accttacaagtgcagcaaagaggaaggttaccaattattaacaaaatgcagcacatctcaccaaaagctatgataaggactgcgaaaaaaaaagaggaactatacccaggaacagggtaacaagtgatgtactccaaaatcccaaatccctaaatgaagaagaaaatagccacaaacacatatgtataaactaaagaaaacactattacaatattctcaaacgatcaaaagaaaataattccttaaacaacacaataaaatatgtttggtgcaccacagtacaataaaaatccaatgtgcatattataaagaccaaaaaagtaattaattagaagcttgacttcatctgaatcttgacagaaaattattacttcaatgaagcacgggatttcttatgccagccatattagtatatcagcgaatggaaaaggctgcccaaaagctatcttacagccaatcagcagtctcaattcccaaaactgtgttaagcacttagcctgaagctatcccagtacgtgactcccatagtgggaacaggctacatgaatacaaagttacatatcttttcccctgcttacaggcaagcaacagtgcccatcataaaacacccgttcacagaaacaaacaggcctcattcaaattatttacaataagacatgagatcatcttacttgatgccaagatcaatgtgctcttggataccaaatccaaagcagccagtgtcactgaagttcctcctcagcagctcgtactccttcaccttcaagccactctccagcagctgcattgc

SEQ ID NO: 5542 - DNA, 385 bp, Zea mays
tcagatcgttgtcaggatgaagaagagctccatgaacactgcaccaaagggtaggatacctccgaccaacaccgagacggctgggttcatataccatggctgctgcggtatcaggcgtgggatcttgtttgtcctcactgggccctctatggcaggcttcctaaacccaaggtagctgccgacaaagatgagtggcattgagattccgagccacaggaaaaccagtgccaacatggtggtgaatggcacagccccagatgatttcacgccccagaggagcatgttcagggcaaagaatatcacgaagacgactccagggaataccaagaccgtcttgatggcgaccttctcccattccagccccccgaacatcttgtgaagacgt

SEQ ID NO: 5543 - DNA, 412 bp, Zea mays
aaattttctttgcagaaactccactaaatcagtatactcatctcttgttcacctaaatgcgcttgcaatagatccgaggaacccaaatctttttgttgttggaggaagcgatgcatatgctcgtgtgtatgacattcgcaagtgcaagtgggatggatcatctgattttagtcacgcatctgactgctattgcccaccacatcttgttgacaataagagtgttggaataacagggattgcattctctcacctgagtgagttgcttgtatcttacaatgaagagaatatttacctattctctaaggatggagggctgggacctgaccccaaaaaatctgttaggattggagcaattgaagggtgcaaatcaacaatgctagcatctggacatgatgtttctcaacctgcacct

SEQ ID NO: 5544 - DNA, 837 bp, Zea mays
atctcagacttacgatgtccagttaattcaagggtatcaagtgcacccttggggcttgtttcttcgttgaatttcaacaggggatgcaagggaaagaacaaaatattcaatgtggataggtatggtttcttacacttcttgcgactcagcctcaaagctttcgtctagtttctgttgtgattaagaaatacagtttctcatctaaatcatccaatgcagacacaccaagtatagtacttctttctgttatgcgccaagaaatgccagaatcacaccactagcaactgcatcatttggggatatggctgattcttcaactcgtgagtatttgttacccatgtatatgacaagagaatcttacataattagtttacctacatttgagattatgtggcactttttcatattgaatttcaataaacatgagatatggttttctaaggaacatcaaagtagtaacgtgttctccagaataattgatcttacataaacattgaatgttttcattgccatcatgtatgtagggaacgagtaattccggtaatcagtatcacctgtttcgctaccaagctttgttttatagattatatgtacctgtgattgaccttttgatttgttgtttgtaacagttctgtataataatctttgagcattcttttgactgcttgattttatttcagctatctttccccgaatccatgtaaaagatccatatcagcgtctcggaatcagcagggaagcatcagaagaagaaattcgagctgctaggaactatctgataagcaagtatgcaggccacaagccaagtgttgatgcaattgagtctgcccatgacag

SEQ ID NO: 5545 - DNA, 675 bp, Zea mays
atctttgtattacaatgagatgcagtagagttacattattttccgagcaagattgaagacccccaacttttcacctgggccagagtcgctggaatgtgcactttttgctctggatgatataccattcgattctctagcattttcttcaatcattgtcaccttaaggatggtatttcctcctccctaattgtctcctgcctgcttcacatttgctcttgccatttatacgctttacactaaatgctttaaacatgtctactatttgccacagtatactgaagatgtgaggtctggaagcatcaaatttcactattgcacgataaacaaaaggtaaatcatcccaccctttttgtagtaactgatcatcatcgtcattcataactctgatgacttttacaacttaggaagcttacgaatctttctctagttttctatgtgttctgttgatatctcagtgcaacttttctacagcactcacctatacgacaatcttgcggcatcttgaagttaacaaatcctgctcgagtttccaatgtggtctataacttgttttgtgcaacttggtttacaggttaggagccagcccttcagatcttcggagtttcgatattgataaccatatagccgtgtgaggttgaaaggttctaaaccttttgcgattgaggagaatggttt

SEQ ID NO: 5546 - DNA, 375 bp, Zea mays
gttttgttcagcaggagtgcaagaaacttgtcattgttcacctatccgagagtattttgttgttctaaggaatttaaaactgcttgttgttccactatttgaactctgcaacaatgttcaggtgatgcagcattcatagtctcattgtcgatggtgtccggctgaaactttggaaactttacacatccattgagttctcgatctgggagcagtaaatttatcttttttgaagtagagattgtacatggcattcttgttttatctattttgtttcgattaaccttgtttgtcttaaactgcttacattccatatataggttactgcctccattctacagggtattgctagtatgatgattgaaatacacaatttat

SEQ ID NO: 5547 - DNA, 334 bp, Zea mays
tagatttattatttacgaggatacggaaaatatgtggcaggcctggattaaaaaaaggctatttttttctcattctcgacagatatgggacttgatgtttgttctctagtttggttaggaaataaacattctttttcgtcttaatgttgaggctcatttaggtgtttgatgtccatcaatggaagtctgatgtagtctgtagctagtgtatttagtgtttacttgaaagaactactgtacgcggatacgtggtttgcactagagcctcaagcctgcgggtccctcagctcgagacccactcatgcagatctcaacagggataaccctccaataa

SEQ ID NO: 5548 - DNA, 366 bp, Zea mays
tcgcgatgctaaaatggacgtgggctcggttcatgatgttgtccttgttggtggctcctctagaattccaaaggtccagcagtttctccaagagctcttcaacgggaagaagcttttcaagagcatcaaccctgacgaggctgttgcttacggagctactatccaggctgcaatcatgagtggagaggatgagatacaggactacctcatgaacgatgctacgcctctttctcttgggttggccacggatgggggtgtgatgaccgtgctgattccgaagaacgcaaccatccccacaaggaaggaggtggtcttgtcaactgactccgacaaccagccttgtatccgtatccaggtgtacgaagg

SEQ ID NO: 5549 - DNA, 387 bp, Zea mays
acaagttaccatgcgaatctactgaggatgagggcgctgctgcagatgttgctggtggaagcctacctccattgtccgcattgttttaatcgtagtgaagcatagggttcactcaacaaactaggcagcccttttctggttttagtcagtgctgcaaagcaatcgagttgttcagaattttcttgtgttgcaagatgaccacaacgacaactgtagacgtatttcagaatttttatcaaggaactcgaatgtgcagttgtagctaaactcccatgaatcctttcggtgaacatagggtgtgcacttatcaatctctttgctagggaaaactttaggcctgcgtcaccattgttgtgaaacatatgctgatatgcgtcttcgaacata

SEQ ID NO: 5550 - DNA, 411 bp, Zea mays
ctctatgaagctgatgctaacatttacagagcaaaaggatctatattagagcagtatagaagggtggatgtgaggcttacattggttgtgagcttgaaagggaatttgttgtttggctggtgaggttcttttgacttctgatgcaacgaggatagctgaaatagcaatcttcttcaatgtcttattatgcgggagcttgaaaatacttcaatttataagtttataggttttcatgttggagcatctttgtcatggtagcatgtaggttgctaaaatagtcagtggagtggaataatgagacaatgtctaagaacacttgtcttttttttaggacagtataataagaactgacgtttccctgtccatatggacgttccacaaaaatcttatttgctgtcatgatgggctcta

SEQ ID NO: 5551 - DNA, 389 bp, Zea mays
  misc_feature (382)..(383): n is a, c, g, or t
ctggtttcactattgatcgtttcgctcttggcagcggagttgcagcatgtgccaacttggctgacatagacagtggccgtgcgtttcatggctatttgattagaagagcgttagatactgatgtcatccagggcagtgcacttgttgacatgtatgggaaatgcggatacatggacctcgctcgattggtattcgacgggatggatgagaggaatgatgtttcatgggacgcgctcttatccgggttcgtcgaaaacgggctagttgattcagcacttgacacttttagacaaatggagtccgcaaaaataaagtctaaccagcatacctttgtgaaccttctgaggctctgtggtgatagaaggtacagagagtacggagnncaaatc

SEQ ID NO: 5552 - DNA, 400 bp, Zea mays
ttctcttcctcctctccgtcgtctctctttgtttgcagcatatggctttgctggtacggtgctcagattgtttccaagaacatggcattcacaaagctggtgaaagcttacagcatctgcatcgatctgatgactatatatatattcttgttttcagatatctgctgcttatttcaaagttcgaggatagtttttgcgtggtgcgctggacctgctgcttcaaagtttttggagagcttgggacgagatccactatttataggcgtgtattttcttcatattatgctgacacccatggtggttgatgtaaacaacacgggagctcatgcatgcatatgtattcctagagccaacaataataacatgatatataacatcgatgtataataaatataatgct

SEQ ID NO: 5553 - DNA, 554 bp, Zea mays
ctactgagctgtcaccaagacaaaagtccagggcctagtagcaaagcgtgcctccattcacgacccactgcgcaaagtggtcagagtagtcccgaatgtctgatagctggctgctagaacgggaaagatccgtgtcatcccttccctggtaaaatgaacaaggttcacagcataaagttcagatctcagaaaggccaagtaaccaaaaattcagttgatgtcaaaatgtcagataaaaagaagtccagataatgaggctaacctcatcagtgtgtccttgttcactgtatgacatagatgattcaggactgatcacatccataggtgaattgatcagtaatgacctgcaaatcacggatgtgatacatgttaacagtgcaagcagagtagtaggacatgcaaattactggaagtctatttattttacctctcaaaaacttcctcgtcaaacgaatttcctgaagatgacaacaaatcaaggtcaaagaaatttgaagagtgcaattcagggtaacctaatcttttcaaataactctgccgctcttctgacatga

SEQ ID NO: 5554 - DNA, 504 bp, Zea mays
  misc_feature (496)..(500): n is a, c, g, or t
tgtcgatggtgaccagcatctcccgcccgccgccgctcttcttctgacgctgacgcagcatccgtttcacgtccgtcgtcaggccctcctacgtacgtacatatgtatgtttcatgtatggagagtgaggacatgcatgcatgcatgcatgcatgtggtgatgtatgaagaagaagaagaagaaatggacatgtctttgctaggcagcaggatagctacctggagatcgaagtcactccgcagcagcgtgttggacgacgatgatgatgccgccaaagtacggaccaagtggccgcgctggcggacttggtggtggctgtttgcagccgccgccgccgccggcgaagctgctgcaaggagaagaggctccacgaaggaggaggaggaggaggaggaagagatgacgcgtgcaggtgcagcagacatggttgctcctggtagagagtacatcgtctactactcgaactaacgctaaacaacaaccagctaatcaatnnnnnaacc

SEQ ID NO: 5555 - DNA, 652 bp, Zea mays
cagttcctgcccagcttgcagggctgctccaatggccaccttgtccgccatctctgccaacgtcggctactgcaaggcaccaaccctgagctggaaggtaaatactgaaatttttcactggttttacatatctacagcactgcatatgaaatcatatatgaatccaagttgtaccgaagacgcatattacattattcctcgtgttgctgctgcttcgtaattggggtgccttctttgcagaatcttattctctacctgttttaatttgaaccctgcagggaagcggaggagtaccaggccggattgtggtctccatgtccaccacccgaagaggcctcgtctccctaagacgacgatcccctcggtttcgcgtctacgcggtaacgtggctgctgcaagtgcaagtgcaagggccggcccaattacgaaccccattttctttatctgatccaactgtgttgttgtatgcgcgcacgcacgtacgcaggcgaaggcggagacggtgagcaaggtgatggacatcgtgaagcagcagctggcgctggcggcggacgtggggctgacggcggagaccaagttcacggacctcggcgccgactcgctggacacggtggagatcgtcatgacgctggaggaggagttcaagatcacc

SEQ ID NO: 5556 - DNA, 356 bp, Zea mays
cttttcctgtataatcagaagaattgttgatctgtgccaagcccggccaagcgcttcagcctccaggtttttgggtaaggaattggaaatcctcctccctccgttgtgacacattattgatagaaacatgaaggatgaagagtcttggacattgagatcatttttcactctaacgctaacaccggttattccagcataatcagaagaaaatattgacatagatcttgatacccagcaatcagtacaaacaggtgccttgataaggctaacgaaacacatgaaggatgaatagtatcgccaaacatgtaaattcctgtttggtgaagaacaggatgcactaggagatcctcatgaag

SEQ ID NO: 5557 - DNA, 482 bp, Zea mays
taatggagcggcgatgtaagtaggccaatcttatttcaattcaactcactcatatatctgtctatttcattcatatttgctgatcactcattttcgcttcactctggctcgacataaaggtctgggacaccccgtggccagaaccctttcagctcaagggagggcttcacagtcaacctccgcacctttgccatggaccacgaacagtattccaagaagagagctttcgtccacgtcctactgaagagaaagaagaccttcgtgacggtgacagactccagcgggaacaaaaagacgggtgcctccgccggctgcttggaggacaggaaaggacggtcccgtctctcccgatacgcttccgaagcggtcgcggagcaggtcggacggtccgccaggaagatggggttgagctccatcgtcatgaaggtgaaaggggcttcgttcttcaagaagaagaagaaggtgatcctgagcttcagaga

SEQ ID NO: 5558 - DNA, 369 bp, Zea mays
  misc_feature (356)..(361): n is a, c, g, or t
ttcttgagctggaacagcgactccggcaggggccccgcgagggagttgttgtagagagttatcacgctgagctcggcgagctgcccgaacgtctcgggcaacgagccggtaagccggttgtctgccaatgccagcgcctgaaggctcctgcactcaccgaggctcgccgggatggggcccgacaggtcattctgccggagctgaagcacggtcaggttcctgaggttcccgatcctttcgggaataggaccatggaagtggttgccgaagaagtccacctcttccaagctcgtgcagttggtgagctcgtcggggatggttccggacatctggttctcgtagaggaacaagagctnnnnnnttctgaaa

SEQ ID NO: 5559 - DNA, 526 bp, Zea mays
tataggtgggtaacaaatctgctgtggcataagtttttgttttccttatctcatgagaattctattgcagtgcatgtggtcaataatccttattggttagatctaaacctaaaatgtcctcttgcatgaaggtggcattgtgagcaacactctacggccgccagtgcccgactcctgcgaccccgagtggaggtcactgatggagcaatgctggtcaacagaaccatctgagcggccaaacttcacagaggttgtgaataggctgcgctccatggcggcatcccagaaggtacaacaacactaagggaccaccaccggcacgcagaagttgtcccagggcagcagtcagtcaaacttgcaggttacatccatgggccgccaattcacgccatccgccatatatgcctaggatctgttcataacccttcatttgttcgtatattgtaatcaaaagttacccgccgtgtgtctacaacgtgtcgtcgcaatggacgcagcaggtgcctgcctattcattcattcatac

SEQ ID NO: 5560 - DNA, 418 bp, Zea mays
ctggagtagactgttcgattttcattcaatgcacaggttagttattggacttaataaacttttaaattacctcgtttcttttagtggtagctggaacaattccttgtaatatttggtttcaggcgctctctgaacgttcagctgaaaaaaagatcaggcgaatgcttttcccccgttaccagcgtaaaaacgtgaaagcctctactgaagatgagtcttaacctatcagctgtttttcctgagcaagcatgcaaacacctggttcaaagacaaggtgtcaagggaatcaacacgatatcatcttatgcgagtttgctagtagatagcgcacaacctgtcgactatgagaatgaccaaaagcatcagagtaataaggtttgccatgcatggtctctaacatgcttccaagaataaagtt

SEQ ID NO: 5561 - DNA, 507 bp, Zea mays
  misc_feature (499)..(500): n is a, c, g, or t
tgtctcggcgctcaccggtacggtaccgtggcagcatagcagcagcagctgctgctgcggcggcttttctctccttcttgttactgtttctcatcatcgtgcatgcaggcccaaccgtgtcccctgctggttgtacgtgctgtgcaggcatcgacgagatatccgcggacatggcgtcgcacaagatgacggtggtcggcatggtggaccccgtgagcgtggtgagcaagctgcgcaaggcgtcgtggtcggcgaccatcgagtccgtcggcccggccaaggagccggagaagaaggacggggaggcagccaagaaggacggcggcgagggcgagaagaaggaaggcggcgagggggagaagaaggaagcaggcgagggggagaataagaaggaagcgggcggcgagaaggacaaggacggcaagaaggcggcgccgccgacgccgacgccgacgccgacggagcagcaggtccagctggccgagctgttgaaccagtnnttaccga

SEQ ID NO: 5562 - DNA, 567 bp, Zea mays
gtggtcgtcttatgcaagaaaggccagggccactgcgcgcttcaccagagagagcaaggctacaaccaagaggtgtgctggaattatacatctccaaaagctagctagaagaccttggtgggtggtgagcttggaggaggagctcatggctgcttcttcgtcctgcatagcttgcaataatggcagtaccgatgagaaggaggagaagcggaagtgtgagctcgtcgggtatgaaggactgcctgagtggctcaaggacaacgagttcatccatggctactaccggtgcgagtggccgatgaaggagaccgtcctcagcatcttctccatccacaacgagaccctcaatgtttggtcgtgagtcccctggcctgacctcatcagtgtttctctacagtttaatttactttttatctaagtcgttactcgttaatactaatatatatatccttcagacagtaattcctgcactccacgtgtattttttttacctgacgtcgatctattctgctgctggcaggcatttgctagggttcctgctgttcctgtgcctggcaatctttacag

SEQ ID NO: 5563 - DNA, 580 bp, Zea mays
tcgtcacctatcacttatccctgagctcatccgctgatctgttatttggcttatacatacatcacagctctgctcaccactatcactgcaattatttttgtttctctgttctacttcgtagtaaaatcatactgatctggttggttctggtgcagaccctcccgggcccggtaaccgatcccagcaagctgcccaagtggaactacgacggctccagcaccggccaggcccccggcgaggacagcgaggtcatcctgtagtaagtgtcatggcacgccaggcttggacgcattcctttctgtttgctttactgaacgatcctttctcttgggcatgtgctgcagcccgcaggccatcttcaaggacccattcaggaggggcaacaacatccttgtaagtttgcacttctaccatccaagtggcatgaaccatacggttccgttccgtgttatttactgctacagtgcctactgttcattggtccaactcagatcagttcatctttgcgaagaaaaaagaattgtgtcttgttgcaccaagtagactaaaagttgtacataccctacaaataaattagatt

SEQ ID NO: 5564 - DNA, 493 bp, Zea mays
  misc_feature (489)..(489): n is a, c, g, or t
ctgcacatgttctcacctatgaagaccgggatggagactggatgatggttggggatgtaccgtgggagtatgttttttcctcctcctcctccgcttcatcaatcattattcacctgtgcatttcatttacgcggtcagttaattaatctcgtctccgtcgtccatttgttctggcaggctcttccttggaagtgtgaagaaacttaggatttgcaagaacagataaatgctagtacgttagcaaagcttattattcgtgcgctgcatatggactctatttctttcttctttttatttatatcggttcatacagcagaaagattttgctggccacagagtggacatgcatgtgataccgaggctatatatactgatcgtgtacagtatactgaagaaaagtcaatcttgataccttccctagaaaattaatttttggtattttttatgtttccttttctgttttctctgagtgccttgtaaataccatgngctg

SEQ ID NO: 5565 - DNA, 636 bp, Zea mays
aggatgagtccatacagccagacttctccaagctacaggtgcgcacaattctgtgttgtcaaagggtactctgtccatacatatctgtattgactgttactgtttctgtttgcgcagtccaacgtcaccgacttactctcctacatcaccatcatattcacaaccaagtccatcgtacagcccaacgaggtgagtgccatccagatcttcatatcttgtggtgcgtctccaattatcatgcctaccgccgtctgttttacacatttacccaatcaatgcagcccgttcaacacctctggaggacccagcccagactacagcccgacctctccaaattacaggcaagtcattctactgccagccaaatgtatacctgtcgtggaggacatggtttcgtgttctgacaaaccttattttgcacaacgcagccctagcggaagctactcccccactgcaccgggctactccccgtcgtccacaggccagggtaatgacaaggatgataagagcgctcgttgaagaggcacaggagaacaaggcgctctagagcactcgatgaaggcactcggtgatggccacatgggaagatcgaggcactttttttctttccttgagtttttgtatggttgatgaact

SEQ ID NO: 5566 - DNA, 389 bp, Zea mays
cctaacaaacacagaatcactcgtgtgacatatttcaacttagttcttatagcccaccaaatgaagagtttacaagtactagagcagacatgttttacaggcgtgactaaaattaacaaacacaggtgtgcatgacaaccagatgtccagactcccatataattttttcagtcacttctacctgagggctactggccagtgcaaatggcacgggtcagtcgaggaatccagtcttccgccagacagcattgcgtacctggcggagatcccgccccttcagtgtgcgcccggctccctccagcattgagaacgtcgtcatcggcgactcccgagcccgcgcgcgcgctaacatctcgtgtggcggtagcatctcctcgtattcatcctcc

SEQ ID NO: 5567 - DNA, 1214 bp, Zea mays
  misc_feature (860)..(860): n is a, c, g, or t
  misc_feature (869)..(870): n is a, c, g, or t
  misc_feature (872)..(887): n is a, c, g, or t
  misc_feature (890)..(893): n is a, c, g, or t
  misc_feature (897)..(897): n is a, c, g, or t
  misc_feature (899)..(906): n is a, c, g, or t
  misc_feature (909)..(913): n is a, c, g, or t
  misc_feature (916)..(918): n is a, c, g, or t
  misc_feature (920)..(921): n is a, c, g, or t
  misc_feature (925)..(930): n is a, c, g, or t
  misc_feature (932)..(933): n is a, c, g, or t
  misc_feature (937)..(938): n is a, c, g, or t
  misc_feature (940)..(945): n is a, c, g, or t
  misc_feature (952)..(953): n is a, c, g, or t
  misc_feature (966)..(968): n is a, c, g, or t
  misc_feature (971)..(976): n is a, c, g, or t
  misc_feature (990)..(996): n is a, c, g, or t
  misc_feature (1003)..(1003): n is a, c, g, or t
  misc_feature (1005)..(1013): n is a, c, g, or t
  misc_feature (1016)..(1016): n is a, c, g, or t
  misc_feature (1020)..(1032): n is a, c, g, or t
  misc_feature (1034)..(1034): n is a, c, g, or t
  misc_feature (1036)..(1043): n is a, c, g, or t
  misc_feature (1047)..(1048): n is a, c, g, or t
  misc_feature (1052)..(1059): n is a, c, g, or t
  misc_feature (1062)..(1062): n is a, c, g, or t
  misc_feature (1064)..(1072): n is a, c, g, or t
  misc_feature (1074)..(1076): n is a, c, g, or t
  misc_feature (1083)..(1083): n is a, c, g, or t
  misc_feature (1095)..(1106): n is a, c, g, or t
  misc_feature (1112)..(1121): n is a, c, g, or t
  misc_feature (1123)..(1130): n is a, c, g, or t
  misc_feature (1132)..(1135): n is a, c, g, or t
  misc_feature (1137)..(1137): n is a, c, g, or t
  misc_feature (1144)..(1146): n is a, c, g, or t
  misc_feature (1149)..(1152): n is a, c, g, or t
  misc_feature (1154)..(1154): n is a, c, g, or t
  misc_feature (1156)..(1156): n is a, c, g, or t
  misc_feature (1158)..(1159): n is a, c, g, or t
  misc_feature (1162)..(1165): n is a, c, g, or t
  misc_feature (1169)..(1171): n is a, c, g, or t
  misc_feature (1175)..(1179): n is a, c, g, or t
  misc_feature (1181)..(1186): n is a, c, g, or t
  misc_feature (1191)..(1200): n is a, c, g, or t
  misc_feature (1206)..(1211): n is a, c, g, or t
atgacttccgggttgccgccagaaacgccatcaaagcaggtaaataaccatcaaagaccagaaacgatgcatctctgctagcagaggcacataccgtgataacagtattcaagatcaaatagagagcatgttatttctagagccaagcatctgaattaaccggaaatataggtagagccaaaacttgaatgatgtatgcatgacttcacctatcgaagctagattgacgtgtgagtgatatattccacctacgaaagctagaatagtactgggcgcgtgtgattacacctactaaagctacaataattgacgcacttgcttccacctatcatatctatagcgatagatacgttactgaatatatgtataagagacaatcattatctatagaaacactaatgaaaatttcagtgtaatagccattagacgattagaaagatttacatgatatcacttaaagccatattacaaagtaactagtgcatgcattttgcagggtgtactacaaaattactaacacttgatctactcctgtgactataaggctttgatggagtggagatccacgcggcaaacgggtacctgttcgatcagttcatgaaggacagcaccaatgaccgagacgactcctacgggggcagcttggagaaccggtgccgtttcacagccgaggtgatggcagccgtcgcggacgaggtcggtgccaaccgcctcggtgtgcgcctctctccgttcgcggattatatggactgccacgactccaacccagaggcgctcgcgcttcatgtcatcgacgagacgctgaacccgctcggcgtgctttactgccacatggtagagccaaggatgcgggtgaaccngacgacgtnnannnnnnnnnnnnnnnnggnnnnggtntnnnnnnnngcnnnnnggnnnannaacnnnnnnannaccnntnnnnnncgaaaanngaaaaaaggggcnnnccnnnnnngggtgggcccccannnnnnncccccanannnnnnnnnttncctnnnnnnnnnnnnnanannnnnnnnctcnnaaannnnnnnnccnannnnnnnnncnnnattttgngtggtgtttctnnnnnnnnnnnnataaannnnnnnnnncnnnnnnnncnnnntntttcccnnnctnnnntnanannctnnnnggannngcgnnnnngnnnnnnaaggnnnnnnnnnntttttnnnnnnccc

SEQ ID NO: 5568 - DNA, 359 bp, Zea mays
aagtgagacttcagaatggccttgaatgcggaggtgcctacattaagtacatccgccctcaggatgctggatgggatgccaaggagtttgataatgagactccatacactattatgtttggtccagataagtgtggatcaaccaacaaggttcatttcatccttaagcacaagaatcctaagactggaaagtatgttgagcatcatctcaaattcccaccatctgtcccatatgacaagctctctcatgtctacacggctatcttgaagccagacaatgaggtcagaattttggtagatggggaagaaaagaagaaggcgaacttcctttctgctgatgattttgagccagcacttatt

SEQ ID NO: 5569 - DNA, 373 bp, Zea mays
tccactgcttctcgagactgggcatcatcacgtcaaatactagctgattagtagtcagttccttttgtaccttgtgtagatcagatcgattgcttgtttggctgatttgatacaattataaacaatgggtttacttttgagtgcactacttacaagcatcattcatacggatttcagtttacctaaacaaaccacttgccctcttctgctgcttggctggtttattacgataactgtgcagaatttctctctatgctagttctccctcaattccaaaatgtaagttgttttagttttgtctgagttaagcttctctaagactaagtttatagaacatcaaattggtttcgctgagaccaccaggaaatatgtc

SEQ ID NO: 5570 - DNA, 390 bp, Zea mays
tgagaaagatggtgtacagaaacagggatgaattcaggcacgacgtagcacagatacaactcaatgcacacatatacaacgacactcgctatcctcacatccctccgcttgctgacgagctcatggaggtctgcgaccatctgctttacgaaaacgcagatctgctcaccgaggcggaagatgctatcgagtagcaatataaaaagctagatttagcatttggatcttgctatatcctaacatagatgatgtatctatcttctgatctgtaggaggggaaaaggttgtacattttttgggcctagcagcaatctacatgtgatcccgaatccagccagcttctgttggtattgtgttgagaggtagtggaagtacaaaatgtctaggtta

SEQ ID NO: 5571 - DNA, 684 bp, Zea mays
  misc_feature (679)..(680): n is a, c, g, or t
cccttcagcttgaatctggaactgaaatcaccaggcaaccatttcaaatcatctaggctctggatttggattactgatggagttggtgggtttgtcagaaaccacatcatcattgcaggataattcaacgcgtcagttacaatatgtaataatatccttccaggatcctgccaaataagacaggctgaatgaaaagaagattctactgaagaagtcatggtgcagtcctcccttccatgctcattgcatctaaattttctttatacaacatgaacaaaataatcaaatgtaagtatccatccagtagtccgtcggagttatagaaaccaaaggcagggcaattacagatatgcagatagcataccgcagcagttcccacattgaagttccattattttaattgtactgcattcagcaagtacgaagctcacagaaaaagcaagccaggtattattgcttcacgaattcactaaaaaaaatattgcatcacgaatctaagctcatacctttgatgcagcaattgtagagttgacaaccacagcacttgcaagcacattgtcagagaacatcgcataatgataataaccacccaactgaatgttgtctcttttagggaattcacgtttagtgggatctaacgaaaagtattctgcggtaagctgcattgctaggcagtganncctt

SEQ ID NO: 5572 - DNA, 539 bp, Zea mays
gtcgaggatgaagaagaggacgaggaaggtaacaagcgagtcgtggtgcttggcccccaggtccccctcaaggagcagctcgagctcgacaaggtacatatatgtcctctcaatgcatgcttgaataatgtttctgaacaattctgatagatgatgatctgctacttgcttgcataggatgatgagagcctgaggaggtggaaggagcaactccttgggcaggtcgacacagagcagctgggaggtgatcgatcattaaattagaaccaccataccctgtcgtcctcatgttcataatatggattgtgccgtgcccgtgctgcattcctgaactgctgtgttcttcggcgcagaaactgcggaaccagaggtcaaggtggtggacctgacgatcctgtcacctggcagaccggacctgatccttccgatcccgttccaggctgacgagaagggctatgcgtttgccctcaaggacggcagcccctacagcttccgcttctccttcatcgtctccaacaacatcgtgtcaggcctcaagt

SEQ ID NO: 5573 - DNA, 508 bp, Zea mays
acgctcacaagttcatcagctcggcgctccaggttagtttctctaatctgattgcgtcaagagatagtctctctatgcaatcagccaggcatcaaaacctgttgctgagtgaagtgcctacctgggaaaaaaaatgcagggatatgacacaatggttggagagcgtggagctcagctgtcaggagggcagaagcagcgcgtggccatcgcccgtgcgatcgtgaaggaccctcggatcctgcttctggacgaagcgaccagcgcactggatgccgagtccgagcggatcgtccaggacgcgctggacagggtgatggtgaaccggacaacagtggtcgtcgcccaccgtctgtcgacgatacagaatgcggatctgatcgccgtcgtcaggaacggggttatcatcgagaagggaaagcacgacgccttggtcaacgtcaaggatggcgcgtacgcgtccctcgtcgcccttcactcggcagcctcttcatagctgcaggtgggtagg

SEQ ID NO: 5574 - DNA, 716 bp, Zea mays
  misc_feature (689)..(690): n is a, c, g, or t
  misc_feature (701)..(702): n is a, c, g, or t
  misc_feature (704)..(713): n is a, c, g, or t
ctgatggcactggcttgccatagggaacgataacatccctccacttcacacactctgaccgtctgatgacagtggcacagtttgcctaagcctttggtcgaatcgaatgcttccctcttcgagatttgtccatgtactacagcaacaagcatcaatggcaaactgccacgagatcataaacatggacaattccctcaagtagcagacataaaaaataaactggaagcaagaaatcgatgttgttttcccaaccgttttgtccattttatttatttatttatttcttatttatctttcatccagatgagaggaggaagaataggattacctcgagaagaaaccagcatgtcaaggattgtagttgggagggaggagggagacgcttgaattggttggtctggtatggttacctgggtgagcagcaggagctcctccactccgaaggagcgtgcggcggcgagcgtgtcgagcgcgaggtcgacgacggcgtagtgtgcgtgcctgcatgcgcgctcaccgccgcccgggtgccgctgtataggaaccagatcagtagcaggaagacctcgtagctgacggagttgacaggaatgactgtgtccagtgctgtgtggggagaagaagaacccggactggtagcgcgggctgaggcagtccaacagcagcgcgccgggcccgacgtcggcctnntcggcgacgannannnnnnnnnnccc

SEQ ID NO: 5575 - DNA, 1322 bp, Zea mays
  misc_feature (43)..(44): n is a, c, g, or t
  misc_feature (1253)..(1254): n is a, c, g, or t
  misc_feature (1268)..(1268): n is a, c, g, or t
  misc_feature (1314)..(1316): n is a, c, g, or t
ggaactcagatatccctgttgattttgacaatgaccaaacatnnggacaaaaataagaagggtaaagattccagatcaatgaagctttttaagagtgctattgcagattttgttaaggaagttcttaaaccatcatggaggcagggtaacatgagcaaagaggctttcaaaactattgtcaggaaaacagttgataaggtttccggttcagttcctagcagtcatattccaaaaacacctgccaagattaaacattatgtacaatcctcccaaaggaaggtgaccaaattagtaatggtatgtctattgtcacatatctagaatattggttattttcatacgtattttgtccatatgtttgtagcattctgtgactacacgttatgcaatagtcctgttcatggcatatgatctgttcagcacctgaacatcatggagaagtataaattatgccatttgccatgcccttgatactaagaaacacaagctgcaattagttggtgtcatgctattgagctcctgaactttgatgtcctgattcctgaagtttgtgctatgttgtcatccagccaatttgataattgttagtggagtttggcaacatatctttatgttcattagaggctgaaaaccctaaccctaacagggttggatgatatatttataatagagttgttgggcctaagcccattacagacagcccattacaatacaatcactatagctctaacaatgtttttacgtgaaatctccattttggtaatgtcacttactcacttaattgagtatattatctacatttatcttgtttggtcatcatatggcaataatttgtttcatcacttggactgacatcttgatttaagtttctgaattccatcgtgggattcaaaatctgtctggaaaaataggctccacataagtggatggcatacatgtcaagttagaaatgtttgaagctatctgatcctgtgcatgcgagttttgagctcacataattttttctggaacgagaaaacattgtatcacactgtttgcatatgtcaagttagaaatgtttgaagctatctgatcctgtgcatgcgagttttgagctcacatatttttttctggaacgagaaaacattgtataacactgtttgcataagaaaatgtgattcagccctcaaatctgatatttccaaatcgatggtatcatattctcctttagttctctacggtgacattttttgttcagcacatgtttgtttcanntaaatatctggctncattgacctcttttatttttttcaggggtatgtcgacaagtaggannncataga

SEQ ID NO: 5576 - DNA, 390 bp, Zea mays
attcttatttggaaaaacatatatggaattccctatcaacaacttaataaaaggatctgatctttttgacaccattgtggcctactgtagcttttcatagtaaatagtaacattttgcagatctttctcttataacttgatgatagaacttattaaagacatgaatctattcaaacggttctccagaatttgacttttgctgcatggcttgggttttggttctgactatgaactaaagcgtgaaatacagattctgcagtattattctcctaacaaatctgtattctgttatctccatatcatatatactgcagaacttggaaggagatccaagctgatgcggcctgtgtggatttgagggttcgttgcccgtacttttatgagctagga

SEQ ID NO: 5577 - DNA, 485 bp, Zea mays
agcactcaaaacttaaaagggcttcctgacgatgatgaatttgtcttttcttgtttcaccttgaaagcttctccgcagcaagggtagcttggcaggatgctggtgggttctcgtcttatttcagtgggtatggccgtttctatacgttgaacaccttacatctaacacctaatgccataaacctgtaattagtcctaacctggtttctttgaaccacgtcgccattccagagccggttcggaagcgctttgctacgacttgtttctccgacgggcatgctgttcaacaaaaacttcaaccaggtcgagtacattgaggcaaaaacgacatgaagatgcactgtacccatcacaagaggtgggatgatgaagatgtagaaaatgaggcacagaaacctggaaagatgaatagatgcaaaaggattcgcaaaaaccatgggaagatcatttgggcaaatcacttccgtccagaaggggatcagagtt

SEQ ID NO: 5578 - DNA, 657 bp, Zea mays
  misc_feature (365)..(375): n is a, c, g, or t
  misc_feature (377)..(382): n is a, c, g, or t
  misc_feature (388)..(388): n is a, c, g, or t
  misc_feature (393)..(397): n is a, c, g, or t
  misc_feature (399)..(399): n is a, c, g, or t
  misc_feature (402)..(417): n is a, c, g, or t
  misc_feature (431)..(432): n is a, c, g, or t
  misc_feature (461)..(466): n is a, c, g, or t
  misc_feature (477)..(477): n is a, c, g, or t
  misc_feature (482)..(495): n is a, c, g, or t
  misc_feature (497)..(497): n is a, c, g, or t
  misc_feature (499)..(505): n is a, c, g, or t
  misc_feature (539)..(541): n is a, c, g, or t
  misc_feature (543)..(551): n is a, c, g, or t
  misc_feature (554)..(555): n is a, c, g, or t
  misc_feature (557)..(562): n is a, c, g, or t
  misc_feature (565)..(567): n is a, c, g, or t
  misc_feature (570)..(587): n is a, c, g, or t
  misc_feature (592)..(592): n is a, c, g, or t
  misc_feature (594)..(594): n is a, c, g, or t
  misc_feature (596)..(596): n is a, c, g, or t
  misc_feature (599)..(601): n is a, c, g, or t
  misc_feature (605)..(616): n is a, c, g, or t
  misc_feature (623)..(625): n is a, c, g, or t
  misc_feature (630)..(630): n is a, c, g, or t
  misc_feature (632)..(634): n is a, c, g, or t
agctgaatctggctcgataatcgcaagaactgcgaagtcgacgagagtttcgtgacttacgcattttatcgagcaccctaatgagcctcgcactaacatattaatttattcaactatcaaactatactgaataatttatcagcttaccgtttccacagccaacatgaatccacgagatcggtagcgattttctgattcaggtaatttgtcgagcgcttggggaatatcgcgctgctagcttcgtcttcatccgatccttgggattccttgatgacgcacggaataacgacgatcttcgattgaagtcttcgaccgagtacttgataagcgatgcacagggaccttgcttatttttgtctaaagcnnnnnnnnnnngnnnnnnaaagtncgagnnnnngnggnnnnnnnnnnnnnnnngatgaagacgaagnnagcagcgcgatattccccaagcactcgannnnnnacctgaatcanaaaannnnnnnnnnnnnngnannnnnnntgggtgtggaaacggtgagctgataaattattcnnnannnnnnnnnagnngnnnnnnttnnnatnnnnnnnnnnnnnnnnnntaagngngntcnnnaaannnnnnnnnnnngaaactnnngtcgncnnngcagttcttgcgatttatcgagc

SEQ ID NO: 5579 - DNA, 421 bp, Zea mays
catgatgaagcctaaggccaagcagatgctgtccctggactgggtgccgctcgtgctgcacgtactggagtgcggcgacgaggtgcagtctctgttctccgtaagatgcgcccccaagatcgccgcgttctatttcctggaccagctgctcatggggttcgacgttgacagaaacgtcgagaacgcgaagcagatgatcgctctcggtgggctggacctcctgatcggcaggcttggcgctggcgacgctcgcgagagcaggcactgcatcgctctcctgaccacgtgcgttcaggccgatggcagctgcaggcactacttggctgatagtctcaagaaggagcctctcgttcagcttcttgctggaaatcagaggaaagccagtgccgcgtcccttaacctgatgagtgaactcgtctgc

SEQ ID NO: 5580 - DNA, 853 bp, Zea mays
tggtgaagcgggctactgctacacaatcaactatttcagcagataaaattgctccaacagtcactcctggaagccttaagcttccgaatggtgtagcaaaacccacctcagctcctttagctgatttgcttgatttcagttctgatggtgccccagcttccaccgttgcttctactacaacacctaatgattttttgcaagatcttctgggtattggtggagttagttcatcaacgacaggtattctttttcctggtgtctctgttctttcatgtgcagttcccatgttagcttgatcctcttattacactgagagcaagagggctttattgacatccctccgtctgcccccgccccaccctgcctctcagaatatgcactttttaccttgtctgaagtttgagttcgctgcatgctcagtgatttgctaattagccatttgccttcctgtccttaaatttacttctagtgctataatacgggtccaaatttttgtatgtaatctcattacttgttatttttaacccactaaaaagtctttattgagtgcttcatttttaccttttgggcactgatgttattatcataaaatttccttgctttagcaatatcaaatctctgttttgttcaggtgtaacttcaaccgcaagcacagatattcttatggatcttctgtccattggatcatctccatcacagaatggcacccccgtaacagacttccgtcatcctggacaaggtaaaagtgattttagcaatttgctgtatttctgtttatgagttatgactgttgttgatttttgttatactgatgtagcagagtctaaacctgttcctggtgtacctgaagctg

SEQ ID NO: 5581 - DNA, 500 bp, Zea mays
gccgaggcggccaagagggccgccgccgccgccagaggcgacacgaaggtaaatatataggcgtgcgtaatcctccattctgcctagaacgttgctggattatgatattcgtgttcgtcacttatatgtatacgtgcccttgtcgggtttttttttgtttttgccagaatggtgaggaggctcatccgagctgattgatcatcgcaaaatcagaccggtgctcccgtgaatcctgtgatgctgtactactgatgacacgtagatgcaaatagacgccgtcgtactaggtactactctgcatggagaggaacgtttgctctcttttgcaactctgctcgtcgtgtcgtgtgtaatcccatccctgtcacggttgtgaacttcgcttgtagctagcgacggttttgccttgccttgtcccttgtcggtgcaactggagtggagtggaggcgtccttgagcctcttccatgtacataggttgtcaataataataatgaataaa

SEQ ID NO: 5582 - DNA, 355 bp, Zea mays
gatctccccttgacagttatattggttgattattacgactaggcactaggcactgcctgcctgcgtgcaggagcagtacaacgacgacgacggcgagtcggcgacttccctcccgcccggaaagctctcgtaatctaaaggaaaaggaaatgttggtaccatgttgtgctattctagcatgcatgacagcaatcgcaagcttcttccccggccactaacctctatgtacattttcagcgtgcaagatcattgtcgacagtagtatacataaaagtgtacacaatatactgaacaaacaaccaagacacaagtgaatgtaatttggcaaagtacagtaagatccatgcataaacaa

SEQ ID NO: 5583 - DNA, 660 bp, Zea mays
agagtggactgcctgatctcggtgacactgatccatcggtacgaattctctgaagcagcgctgagaccttttctgttctaacttctgaagcatcactcacgtcagttctctccaacttgtttccgcttctaaacaggtcatctatgtcagaccaggagacgaagtcgatctcgactcggtaatccaagagaccgtacgattaactgcgtccacgaaggtgaaacactggtcctgaactcctgattacagcctgcatgctagctaggttagccagtgacattactgattaatatgtaaacatcacatgtgcagagttcatgttcggagacctgcgagaagtctacagttgtatggcaatgtgtgcacttgctgctttcttaatttcagtcagtaatgtacagatcattgtcatgacactttttgtctctaattctacagatggtggtagccagaagaagaagacttccagccaaaggtggtcaaaacttcttgatctaaagaaaaccctggataaagcgcctaagtgaattacttagtatgcatcagtcaactgccaatgctgcatgcagagcaagagaatagtgctgtatcatgatgctggaatggaagtggcgacaacttgaacttgttcaaccaagatggaaggttggtggtttgtaa

SEQ ID NO: 5584 - DNA, 395 bp, Zea mays
taggaatctctgagcttgcgatattcccgacgaggacttccctgagataatgccgatgaggaagggggtgaacagatttgtcgtgagtaagaggaagacgccattggagaggagattaacatccccgcaatacagaaggaacctgccaatcgttagttctgaaacggacaaagatgccaactgaaaacagaggtatgattgcctgcataccacaatcttaactgtactgcgacgcaccattccatttttacaccaaggtattactctttgtgacgataagggagcaatcagaaacaagaatcatcaagaataatgctccaggaaagtttttgtacggtaaaaattatgtccgcaatgacctagggtttgctggattgtgttcgctacatgtacaa

SEQ ID NO: 5585 - DNA, 471 bp, Zea mays
aaacaacagcaacctctaccaatgtaatagaatgcaagcgaagcaagcatacatttgctgataaatttgctcctggtctaaaaacatcgcagcaaccgaaacaggaaagaaagaaaattagcagggaccatatttgaatcagatcattagcggcatgatgcaacactcgcgttgcgcacaaggtaatctggaaatgctctgaatggttggtttgttggttcttgccttcacttcttgtgcgccctgtagtctggggagttgtggggcaatggggacaatggatgccttgaagaatctgcacagccgaaatcaagagccctgccagctgtgttgccatccctcaagctagacgacttgcgcttgttctgcaacaagaatcattcatcgcatcatcccatcacaattagcttcctcttagcccgcgacagagtttatcaatttaccttggtggatgtactggcagattttctt

SEQ ID NO: 5586 - DNA, 640 bp, Zea mays
attgcatttagagacaaggattttaagactgcaattgactactactccaaggtatcaacatccctgttctccattcatgcgtaattatggtaggaaacttatcacagaaagagtcatccgatgtaactgtcaaactggtcacaagtcaatgtttctaagcggttgggcccttgccctgttaggctgttagctcaagtacttggcaacacatgctacacaaatttacttccttactcttgatcaagacacccccaaaacattgtatttgtagcttatatgacagagcctgtttgctctaatgcagctagttgcgatgatgtcgacgccttcagctacagtttttgtcaggcgcagtttttcctacttgatgaatgggcaagcagagctcgctctacgggacgccatgcaagcccaggtctgcatgcccgagtggcctacggccttctacctccaggccctggctctttcaaagctcggcatggaaaccgatgcccaggacatgctcaacgatggcgccacgtttgaggccaagaagcagaacggctggcgcagttaggagccgacgacgaacaaagtctctcttccaacgactccgtgccgttgccctttgagagaaaaaggtacaatggcgagtctcctc

SEQ ID NO: 5587 - DNA, 1097 bp, Zea mays
  misc_feature (1080)..(1081): n is a, c, g, or t
gcactgcacaggatcaggtatagttaaggcaatcgatcttgtagtggatatacttttttagtcatgttgcacttgttattcataagatggatttgatttgttaagtgcctttggttttcagcgaaggaccttcttgtaacatattaactgcttttgcaggaagtatcttgtagaggccacaaaagaagcatccaattcttataatgaagcggtaagatacatgattttgcttcttgaaatatttccaatgtctggttgtatgaacagccaagaaaaagctctcaaattggtggctacaactcacgaagagtagaactgtacaaatcttaagagccaatgcctagcagctactttttagtgaaaaaacaactaactgataccttgaggctgtatgaagtagttagcatcaagttataattaatcatttatgactaagcaaagtcctgcttaggaaggttaaatgtgcaaacatgtgacaacctatgattttaatgttaacctgctgcagtaggcaatttaacctgatgtagagtttattccagttgcataaacaataaccagacatatggtattctgtattttttcatttttaactacatgtctggagaaagaacggtgccatactgccatctcaaggaatattccgtctgaaaagaactcatggaacccaatgttccgccagctaactgtttgctctgatgattgttcttggtgtcaggtttcgcggttgcgtgagtaccagggtgtagatccacggttcgatgtgattgcgaggcagtaccacgagattgtaaaggtaatctggctcagtgttgctgccactagtttaccgtatgtttttacttgctaagttgctaaccctggtcgagcttcatcagaaactggagggcatgcagtggacaattcaccaggtggagatggacctgaaacctcaccatgaccacgcagctgtttaagtccacatctgttggaggccatgtttattacctgaatgcagcgggtgcgagttaggggggttgcagtggatttgatttgaatcagagggtttctgtttgtgcatgtttttttttgtgtatatcnnatgttggataatagca

SEQ ID NO: 5588 - DNA, 706 bp, Zea mays
  misc_feature (698)..(698): n is a, c, g, or t
  misc_feature (700)..(703): n is a, c, g, or t
atgccgtccaccgtgaactccgcgtccctcgaccagaaccttgagctcgccaagcaatgctcgcgaggtatacatacagatcaatcgatccgtgtttactgatgcttgcttgagcacataattaatcatgtctgcctgctgcagaggccgccctcgcagggttcaaggcagcagctgtcgcgaccgtcgcctctgcagttcccaccgtcagtgttcttcatctgtctcagcatgtaaacctcgctctaataatcctcgtcgcctgtatgtgattcgatcgatatctcccctgttgttgtttcagctggctagcgtcaggatgctgccatgggccaaggccaacatcaaccccgctggccaggccctcatcgtctccacaggtcgatctctgaatctctccccctgatccctctacgacgacctagctagctatttgctaccaagatgccttcacatgtctttctgtgtgtaactaacggcggaatgcctgctttaatttgctccacgaaaactgggtcgtcgtgcagttgctggcatggcgtacttcatcgcggcggacaagaagatcctctcgctggcgaggcagcactcgtacgagaacgcgccggagcacctcaaggacacctccttccagggcaccggccgtccgcacccagggttcttcaggccttgagcgagagaccatcaaactaccgccncnnnncta

SEQ ID NO: 5589 - DNA, 339 bp, Zea mays
aaaggcagctagctgtgttgctgtctgcatcgccatggcctgaggcgcaccgacgtcgctcgcggatgcatgcatgcgtggaggagcgccctgccgttgccggggttgttgtatctggctggatatacgactggctgggctgacttatatatttagatgatgaatgaatggtcgcttgaccgctgctggttcagttcgtatgagattttgtaccatggaaggccttcacagcagcatagcatgcttggtcgctgcttccttgttgttttgcaggcctgggtttttattcattgcttccatgattgatgtatgtatgaatgaactcaaactatttgtagg

SEQ ID NO: 5590 - DNA, 1551 bp, Zea mays
  misc_feature (1545)..(1547): n is a, c, g, or t
tataacttgtgtgggaagttctggaaggtggccttaagagtaagatatagattcaatggtcagatattactgctttgaaggcaacttgccccgaaaatggccaaggaaccttggacgtggtggtacgtttatctggaagatgtttgtttcttttttctttttagttcgctacctctgtttcgattctgaggcgttctccttttcctgaagttggccagaccacctcttttctttaaagagacagatccacagccaagaaaacacacactgtggcaggctacctcagatttcactggtggtcaagcgagtgtgcacaggtactataatcgttgagggctcgtaattgaaatggatctcatatgagaagattgctcctatatatctggcagtatctcatacacatagtactgttggagtataaagcatagcttatctgctttacatttagatgttctggtggcattcaagatatttactatgtttatctggggttctgtagtactagcacggcatgttttttgctttatcgctccatttttgttggctctggttgcattccgaagatatttatgatgcttacctgggattctgtagcactaagtttctggctcatgtttgttattagaacagattgccccttttgggagcagttaggtactgtaggacacatttttaaattgtttgttttagttgtattgctaagggataaattctttagttgtggatcactttgacttgagttgtatcatatctagatccaatctgcttaggagccacttataaatctattaacataaggagacattatcactgtttcaagtaaaaaaaaagaaagattttgtctttctatcctttatgttctgtcactgattatatggccacgtactatgtacagttactgatgcacttatgtgcatcataggacctcatccagtcttcctcaggacatttaactatttgccatctttacggatgacactaaataaccagtcactgacatggcattttgtttgccatccacctcgtaaagatggcaaaaaataggctatctccagcaggtttgtgtatatgggcgtgcaaagtaccgttttgcactgtagaccgcactgtttacaaagtggagttttaaatagacagtgggatagagaggctgctggagatagccttgttagattgtccttcttctctgggctctaaaataatccatatagactttcacaccgcataaggggaagggaaaaggtatgttggcatgcattcaaatgtagcttttcagaaccaggtacctatttagtaaaaatatggtccatggtattatctatgacactgaactttgattataagtttataacagagtggtatcgtctactactcagaactttggtttataacagagcaccatttatactagttgagcctctactcctttgttcagtattctgattattcaaaagtttgcaggcggcattttctgcagtgcccttcaaccttgttgagcaagaattttgagaagcttattcagtgtgatcagcggctatatcaatnnngagc

SEQ ID NO: 5591 - DNA, 403 bp, Zea mays
  misc_feature (7)..(7): n is a, c, g, or t
tggaganatactgtctccaaactcattggatcacctccaggttatgttgggtacactgagggaggccaactaactgaagcagtccgtcgccgcccgtacacagttgttctctttgatgagattgagaaggcacatcctgatgttttcaacatgatgcttcagatattagaagatgggcgattaactgatagcaaggggcgcacagttgatttcaagaacacactattgatcatgacatctaatgtgggaagcagtgtcattgagaagggaggtcgcaagattgggttcgaccttgattatgatgagaaagacaccagctataacaggatcaagagcctggtgactgaggagttgaagcagtacttccggccagagttcttgaacagattggataatcagcttt

SEQ ID NO: 5592 - DNA, 516 bp, Zea mays
gctacctacacgttggcggtgctggctgatgggctcgtcacggacaaccctgccactgcagcttcctacttcagtgagtatctgatagcctgataggcagctatcacacgctgaactgaaaattacagatgcagcatatatcattttgttttcagacaaaatgcctttttttacaactagacgcaaaactttgaatcattactgtttgtgaactgcagggagtccatgcagtgacatgaagctgaacctgagctacacgatcctgcctgcacaacctggcgctctggtcaacctggcatccccgggggcgctggctccggcgggagcgccggcaccgttgctccaacccgctgacgttgtggacccgccgctgcctccagttaaagctgtgatcgccgccgacgcgccggcgccaggggcggctgacaacacctcctcggcgttcagctccagcgcggggaacggcctcttgtgggctggcatcgctgccctcttgtccctgacctttctgcactg

SEQ ID NO: 5593 - DNA, 647 bp, Zea mays
tgcagagctactccgtgacgcactggtctgccctgctccggagaggaagagaggttctcaacgtggccggccggttggccccgacccaggtctgcgtccttcgtcgcgcgttgcttgcatatttccgctccttcgtcatcttcttctccttcttcttcttcagtgttctgacctgcaaatattgcttacctgctgtgcagaacgtgaagggggctggaccgttgtcgagggttcagatcagcgccatggctgtgaaggacaacctcatggtggccggtggcttccagggagaactcatatgcaaggtatctctcgtcggtgttttcccttctcttctgtcagttttacaaggtctatctctcactctcctgcctgcgcgcgcatgcattcactcgttcgtcagtacgttgatagacccggggtggcattctgcaccaacctgaccggcggcagcagttccatcacgaacgccgtcgacatctaccaggcacccaggtaagcgatccagaccgtcatgttctgataacagacaactgagctgttctgttgtgaaccacgaccgacggtatgatgatgcagcggcgccacgcgagtgatggcggcgaacaacgactgcgtcgtcaggacgttcgacgccgagagataca

SEQ ID NO: 5594 - DNA, 356 bp, Zea mays
tctggcctatggcatgcgtgccccggttccaggagccgtagtacctggtgctccagtaaacattgctccgatgccctatccaatgccacccccaccatctcatgggtgacagggtgagggacacatttcaaatgctgtgtagcgtctaaacaaacccataatctccccctatgccagcattttgcgggtgtgctgctatgtctcaataaagcaatgccaataaacccttgtacattacaaactgttgttacatgttgcattgaggacattgcagattgtgtactttgtgttgcatgcaaactttttcatgtacatctccaaaatccaagtgtttctcgttatggcagcttgtactt

SEQ ID NO: 5595 - DNA, 200 bp, Zea mays
  misc_feature (187)..(187): n is a, c, g, or t
gcttggtattgaccctccgaaggtgtcctttgctatggcccacctggtactggcaagacacttcttgcaagagctgtagcaaaccggactgatgcttgtttcatccgtgtaattggaagtgagctagttcagaagtatgttggagaaggtgctcggatggtcagggaactgttccaggtatatctangtctgtgaatccg

SEQ ID NO: 5596 - DNA, 162 bp, Zea mays
agaactcatctcatccagaactcacaattgagggtcgaatagcagggatctgggtaggtaggcgaatgaacatgcctgagttcacgggacatgcaactctgaacaagtgatcggagttgcttctccctcgagtcgagagcctggacgacgacttgtggttgt

SEQ ID NO: 5597 - DNA, 761 bp, Zea mays
  misc_feature (753)..(758): n is a, c, g, or t
caagcctaactaggaatcgtcctacctcgatcaaggcacagatctatataaacaaactaaaatgaagctgaaaaaccgctggcagctttgttgatgccaagaccttgatcaatcctcaattcgtggctcatcaattcgtgccacggtgagagaggagtctgtcagtggcggcgacgtggatcaggacaggaggacaccgcggcaactgacaggtaggaccgtaggacacggcaccgccgccgcttcgtcctttctggcctcctccagatccctgatgaattggctacgctgggtgtgacgacgcattcgctgcatcgtgatcatagaaattagaaagtgagaatatactcagtacaaaactttacatctaaactacgggctgagctttacatctcatatttactcctgataggctgatactcctacattatatccatacattttctaccctaatgcctattttttacaatttcccaccaaaacaccagtctgtactattacttgaccaccgttgttagaaagaatggacaattaacatgaaaaaacaaaagaaagaatggagttagcgtcagtgttagcacctctttacagcagtcagaagttagcactggaccctgatggacgatatggataaaaaaagaagccggcattctccagtgagagtcctgtaataataaactagttagtaatttgaagaaaacgatttcgatgtgttggaagagatgccagcacaaaataccgcagctggtatcnnnnnnaag

SEQ ID NO: 5598 - DNA, 384 bp, Zea mays
gaaaacaatttgaaggagctgtaactagctgtatctcatcatgctccttacatcttacctgccgtcttgtttgtaactagttgactgtttggtcatgagcagttactgaatcgatgtgtagacagccctgcaaatgctcacgagtcaacgataaacatggtggccttgtgtcttggcaactggtgtttgcagcaggcggaccagcagctgtctgctactaatatggatccgttgattttgttgtattattctttcgactggaaggtatcataagtcaattaggaggtgattcttatatgtattcgttatgctgcaaaagtgaaggtgacaatttttttggtttattggcaagtacatggaatttacatttttgttgagatggtc

SEQ ID NO: 5599 - DNA, 898 bp, Zea mays
attgttttgcttcacatcaaatacatacacctcatttttagatgtagttatcacaagtgtgttctttttggggcaaaaaccaccagatgtaacagaaccaccgttcattcgggatatgaaccagtgttgcctgcaaatatagtgcgaaaaattgtgataacagatatatgtcatttacatctactgcaggcaacaaaaaaaaagtgtatgcaacaccagttggaaagtatcaaattggcgcttacctttgcacctcaagattaaatacataaatatcgccatagcagttaactgcagccagccattgcccatctgcacttaggaacatcttcgttataggtgattctcttgagatttttactccatctgcctttcttgtagggtgaaatacatttgaaatttctcttgttgcaatgtcaatgatctgaacaatgtagaacaaataaggagtacgaaatgttaaacaataataatatgcaacaggaagacatctttaaaaacaatgattttggcatagttacttgtctgatcatgatcttataatataatgactaaaccacaatgaaaaccaataccccgccaaacacctaatagcttactacataactagatgttcaaaatacaagtacttctaatcatgtaactaacagacattggcctaccagtaggtagaatcacagggacaatttcatgtctcagtaactacatgtgtggaactgctgatttcaaatgtaagacaggtaaaattttaaaatagaattggatatatggcaccctggcatgtcctgcttcctctagcagaaacactacaaatattttcatacaacatcataagatagaagagctaaaatacatggcaggtgacttacgtatatttttccattacgccccgcaagta

SEQ ID NO: 5600 - DNA, 1039 bp, Zea mays
gtttagaacttaccatatgacactgttattaacacctaagattagagaatatttctgtcattttttggtgattaaaaaaaattgtccatctaatttcagtccttacaagaactccacaaatggatgtgatcaaaccagcacaaaactccacaaatcttagattttgcatctttggtagcatcattggttactccataccggtatagctaaacatggcaatccctgccaacatgcaaaaatctgaagcagggtgaattttgaattttgatcttgagctattgttgaatgtctcttacaaaatgtgtagaaatgctattatggcatttaactaggttggtaagctgcctaaatacatataggcaggatatttcaatgtttgtttgtttagaaatttgaatttgaagtgacatgaggtgtaagattacagatttcgccagcaaacaacaatggctagtcttttaatattatatttactggcctttaatttgtccccatatcattgcatctgacagcatctttcacatgattttattatagtcagtttttaacatcccattaaaattctctcccattccatcagattttacagtaatcctagaatgattattcagtagtgtattctgattttttggactttgtaggtgttgacatcagcatgaatactcatctgaagactgtgaagctgacactaaaagggaaaaatcctgttacccttgatcaccttagtgtgaggggaaacaacatccgctattatatccttcctgacagcctaaacctggagactttgctggttgaggaaacaccaagggtcaagcctaagaagcctacttctggtcagagttctttttctcccatttcaaccttcgagatttaccacctgctagcattatcatttcatccatcttcatcaaaaaccagggaagcccttgggccgtgggcgtggccgtggtcgtgggcgcggtcggggtcggggacgttgagcatgctagctgcttttggaaattgcattgcgtgcatctgcagtgtaatctacatccta

SEQ ID NO: 5601 - DNA, 978 bp, Zea mays
aaagaagaaggaaaaaccagcaaaagttgaggttggcaatcatgtgcaccattcatgtttaaagtagtgcagtttgatttgttggaccacttagttatggtttccctaaaatgcaggagaaaaaagttgcagttgccactgctgccccaccatctgaggaggaattgaacccgtacactatatttccccaaccagaggaaaacttcaaggtatgcttgctccactattctctgacatacaagtcgtagttttggcactcaggcacattgaccagttcattgatttgtttgtttttccatcataataagttttcttcagtgatcctgatatctttttatgatctaggttcatacagaaatatttttcagtgatgggaacatatggagagcgcataacacaaaggaaattttagaaaaacatcttaaagcaactggaggaaaagtgatgacccgttttccaccagaacctaatggatatcttcatattggtcatgccaaggttttgataattttcttcttgaatgcatttccttgcacaaaattttaaaattgatatatatgcttacatgcttcatcacacaggctatgtttattgattttggtctggctaaggagcgaaatggccattgctaccttaggtaatacaattttatttgcgaatggtttgctctaactaacatacatttctacaagcattcatggctgttaatgctgctttaggttactcttctgtgcaattatagtgcaaaataaattagaagagttttcttttcatctttgtttccttctaaccttatgttgtagatctttgaaaattttgcctgtctttttatatgatatttatttactcctacattgctgtgagacttgtggtttgttttgcttgatttgttttaagacattgtaattgcttcagttctttttctttaccatttgtttatttgaataacagatttgatgacacaaatccagaagcgaa

SEQ ID NO: 5602 - DNA, 369 bp, Zea mays
atctaacgtgttctcagactccaaagttagagccctctccccagggttctacatcggaagcaccttgatccgtgtcctgcctcatgtgtacgatgtgttcaggagacagcactttgttccaagcctgagaccatcttacatgtatgcaggccctcgtgacgacctcttcagcctcgcttgggacatcgtcataccttgcggagcactgctactgtcggcgctcctcttcttccagcagtggcgcggaggagctttcttcctctgttcgaagaacaggaggacgagagagtacgaaatggtttccgtggccagctcttaagaaaaatcgagtggatatgaaatgcttttatagccggttcttgacatcgt

SEQ ID NO: 5603 - DNA, 726 bp, Zea mays
  misc_feature (719)..(721): n is a, c, g, or t
agaggaggttgacaaggttcttgcttcagtagcaggggagactgcctcccagctaccagatgctgccagaacacagaagatacatgaggcttcaacaagcagggttccagaagaggtaactaactaacctccccttaacttcgcttgcttgcttgcatgtatgtgaacattgaacggtgcaaaggagaaatatgcctttcaagaagctattggatgcaaagtggattttggtaaataaacatgtcattgactgctgtagtgctgtatgtgttttttttgagggaatgactgctggatgatcagtgtggaaactgtataccagtttaagtattgatgctctcgatagtatgtttggtcacaagcgattgatgcggctgtttgactttattttcatcgtggattccatgactctggttgtaataacatttgtctttatatttcttttgcagcgacaagctgttgcagagggtgctgatgacgacgaggaagacctagaagagatcagggcacggcttgctaaagtgaggtcgtaaatcatatacatatctgagctttctaacctggggagcccatggctcacaaaatatggtgccaaaacccgtgtattgtgaactgagtcgatgacaatgcaaatttttttaattggccctcgagtcgaccatatatgaagtggcagtctattgttgtacaacgctacgagagtggcatggaatatcgannnatggg

SEQ ID NO: 5604 - DNA, 529 bp, Zea mays
gaagccaagcacataaacaaatctctgtcagcacttggtgatgttatatctgcacttgcccaaaagagttcccatgttccatatagaaatagcaagttaacacaagtgctgcaggatgccttaggtattgttaaaagcccttgtattgttggagatgctgttgtcaatatactgttctaaccacttgtttccctgcaatacaggtggtcaagcaaaaacattgatgtttgtgcatgtgaaccctgaaacagactcttttagtgaaacaatgagcactctcaaattcgctgagcgtgtagctacaatagaacttggtgccgcccgtgcaaacaaggaagcaggccaggtcaaagacctaaaggaagaggtatgacgttgttttatgataattaccaaaggccaggttaaactttgatctcataactcatagtataagaattatatttgtcagatcgccaagcttaaattggcattagatgaaaaggaaaatgaagtggcacagtttaaagatcttgctaaccgtgtgact

SEQ ID NO: 5605 - DNA, 722 bp, Zea mays
  misc_feature (157)..(157): n is a, c, g, or t
  misc_feature (159)..(159): n is a, c, g, or t
  misc_feature (170)..(171): n is a, c, g, or t
  misc_feature (173)..(175): n is a, c, g, or t
gcgatcataagcggggcttctgcccccgccgtagcgatcatatacagggcttcgcctttcatacattgctccatcacggcgaccatagccaggataacgtccacgccgaccataatctggaccgtagtcccttcggtaccttgggctaggtgagcgnantttgtagtganncnnnaatatgccttccgggatgatgacggcgatagagatgaccgatacgacatccccaaacaaggtgcttatgacaggcgtggtggtagcccctacatgcgctcacctagcccaaggtaccgaagggactacggtccagattatggtcggcgtggacgttatcctggctatggtcgccgtgatggagcaatgtatgaaaggcgaagccctgtatatgatcgctacggcgggggcagaagccccgcttatgatcgctatgacaggaggagaagccccggttatgatcaatactaggtaaggcggagttacatgctttacgaccatagagtcaatacactgaagtgcaaagattacttattcgttttcagtggcatgacttgagtttattatcagcttgctaacatgattctcaatcatgttttgtagtccggtcgattctgaggaacccagtaaagaagtagtttccaaggaagaggtggcgagcaacaacatgatttttgccacgccaagtatacctggaggagccgtggtgtcccaagtatgtctgagtg

SEQ ID NO: 5606 - DNA, 387 bp, Zea mays
aattaacgtatttctcaaccagtcatgctaggtatgctaggtgcagaagaaccatctaaatagcatcagaccattatattgttagaaaatggaagatgactcacaaacttctaagaaaatactgaaaacaatgttttaaaaacaaaatacaaggaaaaaacctaggagaaacaaggtaccatggacaaatatttcattttagaggccatctacaatcaaaaaaatacaaacgaaaaaatacacgagtttcaatttttccatatcaattcaagtaagaaacacttattatttatgatgctagttggccaatgtcataaaaacatacctcattagccagtccaaataatacatggtatgctgctctatctttaagcaacttgaccctct

SEQ ID NO: 5607 - DNA, 529 bp, Zea mays
cgtcatcgatgacaagatcctctgcatgcacggcgggctctccccggacctggacaacctcaaccggatcagggagatccagcgccccgtcgacgtccccgaccagggcctcctctgcgacctcctgtggtccgacccggaccgcgacagctccggatggggcgacaacgaccgcggcgtctccttcaccttcggcgccgacaaggtcaccgagttcttaaacaagcacgacctcgacctcgtctgccgcgcccaccaggcaagcctccctgctcctgtgtcctgcactcctgcttgcccatgtgcttccacaaccagcctgacagatcgactcacagttcatttcttgcgatggcaaattggcaatgccattgtgccaacaacaggtcgtggaggacggctacgagttcttcgccgaccggcagctggtgaccatattctcggcgcccaactactgcggcgagttcaacaacgccggcgcgctgatgaacgtcgacgccagcctgctctgctcgttccagatcctcaa

SEQ ID NO: 5608 - DNA, 475 bp, Zea mays
cttcgcaaggtgaggtttctattgtctcaaggatggtacctgcacttgtcaaacataaaagctcgctacctattttatttagacacaattaaggcaataaggcttactggagtttctgcatactcaagggttcatgggcatcccagactcccagcaatggaatctgcaaggtatggctcattcgaaccatatgtggagaagtttaattccttattagtgagaggagaagatagaaaatgtagaatagttgtatagtgtttcaaaggcgttgcctacgcacgtccggccgtccaggtatctccagctcgctacctatttttgccattatggaatctgcaaggtatggctccacattgatacagttgatggtttgtctgcatatctagcaagtgtgcaggaggatgttgcatcagttatcattggtaaaaaaactatattgcatgcgcggactgcctctgatgctattgatatgagg

SEQ ID NO: 5609 - DNA, 366 bp, Zea mays
cagtagcatagtaaccctggtacctatatcatcatcgtgtagtttaattttttccagtgcgtttaggcggtttaatttgtatgagccaagtattactgtagcagttatatagaataaaacgtacatctggaaatgttcacagggctagatgagcccttttcttctgaagcaatcgacggtctccctgatggccacatcaaacggaaggaaacaaacgcccagatcgatcaacttcttggagggctcctttgctctcatcaaccaacctgtttgtcctccttgatagttgattctgatgtgaaaaaagtaaaaatgtcattaccaaaacgaacagctagccctgcttacacaaacctgatgcatgtt

SEQ ID NO: 5610 - DNA, 367 bp, Zea mays
actaggattggatgtcggcaaattttggcatgcagtatgcacaactgcccaagcctacaagctaatgtaaacgctacattcacatctgcttaaactatgccgcttcaacgctttgcgaggatcactagcgccagcatcgacatagaggcaatgaacctgaagccctggctctcccagaaattatccttgtttccatggcacatgctgttgggctgcttcatggccacctggtccatgagctccttgagagccttgtctcttttctcccccatctgcagaataaatgtaaacaggatcagaccattgatagaaatattgtccacgcacaatcacggccaactgcattagctgaggatggtcaggttca

SEQ ID NO: 5611 - DNA, 384 bp, Zea mays
gctgtggggagctggcgaatcgagcttcgtcttggggaaggtacgttcgtcaggtgctcgtggaaatgccgtaaagcatcgcgtctattttagccaggtgctagggtagacggaaggtttaagttacgacgatggtgtgtttttggatatttgaatatttgatattggttttaccaacgttttcaactagaaatagcatttcctctatttttttactgtactatctagtgctccgatgccatgttccgtgtttcagagtagcgtgtagggaagagacaaagacagacgactagtgaagcgctgctcttctcaaacgaagcaccgtttttagcattactagctttcaacagtggagcatttccatctgacatctgtatgtgatgc

SEQ ID NO: 5612 - DNA, 480 bp, Zea mays
  misc_feature (470)..(471): n is a, c, g, or t
gtttgtttgctgtaatctcctcaatgtttggtcgtctctcaagagcagggactacgttttccacgtgcttcaatttaattacccaactaacttcaatctgtcgcgcagggtgttcttggcatcaaggtgaagatcatgcttgactgggacccgaagggcaaggttggcccgatcactcctcttccggacctggtgaccatccacaccccgaaggacgaggacgagccgcgccctccggtcttggcacctcctgaggtgtaaggtcccaactgtgtccttgaaatggcagtttgatcgggtcctagataggtttctatcttacgataaggacaatgctaaggcagttggttaccttaatctttatggacagatgctatgtgttgcttctgtggcacttttgtttaagctaagttttgcggagacaagatacttatatatgttcccgatgaaattatggttccttgtatgtnntgggaaatt

SEQ ID NO: 5613 - DNA, 378 bp, Zea mays
tgagtcttgctgatgcattgacatcagaaaatatcagcatatttcgttttgatttttctggcaatggagaaagtgaaggcacttttgaatacggcaactactataaagaagtggacgatttacgtgatgtgatcctacatttcaaaaaacacaaacgtgacacccatgctattgctggccacagtaagggtgggaatgtggttatcctctatgcatccatatatcatgatatatctaaagttgttaacctgtctggaaggtttaagctggaacgtggtattgaagatcgttttggaaatgattacatggaaaagattgatcagcatggtttcattgatgtggaagacaaaacaggacgtatcatctaccgtgtgacaa

SEQ ID NO: 5614 - DNA, 694 bp, Zea mays
atctttgaaacctcaggtttgcctctttagtgctcttgaaaagttctcttgagaaaactgggttcaactagccttatagttatctctttattacatttcagcttagttcagaagcaaagaaagttctggtggagtcgtatgttacgcttcgtaggggggacagtactcctggaactagggttgcttataggatgacagttcggcaattggaagcattgattcggctgtcagaagctattgctcgaagccatttagaaagagttgtaagtatactaattcactttatcgtggatcatgttcgtcatgtaacactttgctatcttttatagaatcatggaatttattaagtcacttgccctttcatggacatatgatcaacctgtatttgttatcggaattttttttgatcggaagatcaacctgtattttgattttcatgctgcttgcgttgttatcgttgcccatttccattactttgtgactaacttcatttgatattcaaatcttttaggttctcccagctcatgtccgcctggcagttaaattgctcaagacatccatcatcaggtgattcagttgaactggtaacatttatgaattgatgtgtgcataatgatgccgctgatgctaatctcattgattttgtgtagtgttgagtcaagtgaagttgatctctctgacttccaagatgctg

SEQ ID NO: 5615 - DNA, 625 bp, Zea mays
tctgatttcattgattgtgctgagcacttgataaaaagcaagtactgctccagggaaaagctttgcattaatggcagaagcgcaggtggcttattgatgggtgctgtcctaaatatgaggcctgacttattcagggcagctgttgctggagtgccttttgttgatgttgtcacaactatgcttgatccaactatcccactgacaacagctgaatgggaggtatctatttcctcaaaattattccatgttcggtgtcgtatcgcaatttttattcttgccggttcttatgaatccatgtgtcgctgtccttggttcaggagtggggtgatccaagaaaagaagaattctattattacatgaaatcgtattctcctgttgacaatgtaagtgcagatctttatttgtaaattgaaatattgcatcaccctgtgtcatttgtttgtggacgccacaggtgatggcgcaagagtatcccaacattcttgtcactgcaggcttaaacggtatctgaaggcttaaacggcatttgtggttggtctgtggtagctagctgagtatctgactcggtgttgttggtgataacaaaccagatccacgcgtgatgtactctgagcctgcgaaataa

SEQ ID NO: 5616 - DNA, 498 bp, Zea mays
  misc_feature (480)..(481): n is a, c, g, or t
  misc_feature (491)..(491): n is a, c, g, or t
tcggcatcagcattcacattcatggcagtggaattcctaagggaccatttcaacgacaaggatgatgcggatgcccatgaagtaacctccctgtcaatggacacaaaatcagaagttgagaaatcagcttagggtttcttttcttatgatctatgaagtgtattggtatctgtatccctccccggtggaaattatccggcgggatctttctgtcttgggcaacaaactatgtttcggtcatgtaaatgcggaggacattcattggcagctgggcggagacattgttgtgtaccagaaagaaagtaattgacaacaacatgatcatattgtggcgggaaatttggatccataccattaaaagatcaccactttggatccataccattactatctcacttacatgtgggtcgacatgagtcaatgacatgtggggtccatggtatgtatttaaagtttggatcttttaatggtatagatccnnattgttcctnattgtgg

SEQ ID NO: 5617 - DNA, 625 bp, Zea mays
  misc_feature (616)..(618): n is a, c, g, or t
cctttatttgaatttagcttgttatttcatctcatttgtcctgttttggtcataaaacaataacatattagacatatactcttgcacttgcatgtacatgtataattgtatacacccccttccaatatcactatttagttcgtctattacttgcttcacacagacaggtgcttaatggtgtttatgtgctgccttgtgaccttttccttccaaagaaggaatttttaatgcatagattatgacttttttcaggttttggtgaccaacatgctgcttttggtgctcgtggtatgggtggattccagatgcctgaacctccaataacgcctggaccatttgctcctggattgtcacgcaatgaaggtacaatccctggcattggggttgcaatgaccttggcaggccagtcttttgatggatctgatggagagcagaggccatctattccgggtcttccacctgggcaacccccgctgccaccaggtcctcatccatcacttcttgggcagcaacaacagtatcaacagatacctcagcagcaacatccccagttttcgcagccaccacctccaaacatgccccaactgcaggcaccagctcacatgctttcacattnnncaaggat

SEQ ID NO: 5618 - DNA, 916 bp, Zea mays
ctcttcatccagtttcaaaggtttatctgcattattggttgatagaagaccagtaagagctactgtaactaagtatcacttgcaaaggctgggaattgcctgcgatgttgttgctaccattgaattggctcttggtgtgctgtccgggagaaatggcagttctctaaccaggtacttgtcttgcctacgtactctctaaaagttgaagtgattgagctaccatcttgaggacttaggaataacgtggcatacttggctgcttgggtacttaaattgcatgtgacttctcttcaaaattgatatttggtttgcaacgaatttgttgcatatgcacactgaatattgatcgcttcagaattgatattgccatcataaaatatttttatacatcctttgaccatccaactcatcaaatcactgttgtggtcaatactaatttcttcattatttttacacacacacacacaccaaattcatcgtgttaccaaattcaccgagttggatctgctttcagtttgtatcaccttttttagccgtagttctcattacggttcttgcgtattatttatctagttcaaactttgcttatgttaaataattaagtgaaaatgcggtttttgctctattaaactgtagaatgcaaatgcctactgaactactttctacatgcagtttcactaattgttacctgtatttctctcgacatgcattttctctcgttttccttgggtctaactatttttttttcctgaattcatcatgcagcacgaagcaaccatgcatgttattgattgagagtgattcatggggcttcaagattgatgtacctttacgatctcgactcctggagatgaagcagaatggtccacctggattgcccaaaactatccttctcgcagctgcagaatcgggcaaa

SEQ ID NO: 5619 - DNA, 818 bp, Zea mays
ctattgtgcacacgtttatgctgacttcctccaatttttgaggtctcacgaatttattttttgtgacttggcaggtaatgtatgatgcttctggtatcagactgcatgctggaaagcaagcagaggtacgtaataactctttgcgtgccatctgtactgttggttcaatagcctttctgtatcgttacaaccttgtgatagctctctatgtattatggtaacaatttgtgtggtgcttatgttgaacttaatttagttttctccgatcattaggtattgaatcaaatagtttgtgaacttccttctgaacaccccttgtctgagacaagaccactgcgagaacttttaggccatacaccaactcaggtttgttcacatgtcctttttattgtttttttcaagtgaatgcatttcattgttgttggcaaaacgaaagcgatgggttattggcattatagttatgtggacaccaagtgaacatcaaacgggccgaccccacatgcctctttttacttggcaacaatatgtagatatgcctatctactctatcaacatcattcagcttcgtcagcaccactatcttctcgtggcacacatttatgaactacctttttttatgttttactaatttcttgggtgtcaaattgctcccaggtggttgctggtgcattgcttgggtgtacaatagccacagcaggacaattattcctttgaactacgaaggtgcggcagaaatgttgtagcatttgtatcgcagggacttgagaagaagtttctccagtgttctgctactttaggtattggtaagatttgcatgt

SEQ ID NO: 5620 - DNA, 580 bp, Zea mays
ctggagggagaagattcaaatctgtgtttgacgtcaagaatgaattcaagtcaatgtttctgagctttgccagtgccaagaatgccgccatggagatcccacctgaaaactacctcattgtcacagtaaactcttggcactcaattgactaaccagcagtttgaacaacatttgttttgagaacaaaatgatggctaaattgtcttcttacatgtttgtaccagaaaaatggaaatgtgtgcctgggcattcttgatggaacggctgccaagctgagtttcaacgtaattggaggtacagagtgcagtcatacagtacaaaattctgagatttgggggcaatgcatctttggtgtactaatatgacttgacctttcttttgtagacatcacgatgcaggatcagatggtgatctatgacaacgagaaatcgcagctgggatgggcgcgtggggcatgcactaggagcgccaagtctattctgtcttcctttccctgagctcagttctatgtacttctgatagagtttaagaaaatcactatatcaaacctcctcgcaatgcatgaatttcctaactgaag

SEQ ID NO: 5621 - DNA, 460 bp, Zea mays
ctggttgagtcccgtgaatcagataaataagaacttatgggtcaggtgagggatattggttgcattcttttctttatgaagtgctgttgagatcaatatgtgttcgttatttacttgctcgttttatcttctgtttgtttttgcagaggaaagctgacggttcattccttgctgctgtgcttgagcagtggagggacatcgacaagccaaccatggggggtgcgtcagcgttactaaggctagctgctaagatcgacttggtgagaggagagattagaagtgatggggggggcgttagtcttgtaggctgagtagattttcagagtactgaagagcttgtagttctgccaggaacatgcttattagttgaagcaagagtgttgatggtccattgcttgttggattttgtggttttaatttgaagggcgcaaaaacatggctggatcagcttgacggaaga

SEQ ID NO: 5622 - DNA, 383 bp, Zea mays
tttcttgggctcgatctacttaaagcattcacacgagaaagaaataagcagaaccatcaggattgaatgcacctttcttgatgacggtgtactctaaattttgagaaggctgtagttccgttcttgtagggacatagaggtatgtttaagtcttaattaatcagcaactacactggaggctatggattctttatgtatcaacacgtgctaatgctaagatctctacaagaaagggttgttaccagtatgtgtaatcatgtaggtataacattattgttcattaggagaattaagagagtgcaggcgggtaactggatgcaggatttacatacattttgcaatcaggaatcggaaagaagagaagcgtaccatgtaatcaaacc

SEQ ID NO: 5623 - DNA, 385 bp, Zea mays
ctacaatacgtacgttgtacgtgcatctttcttctacaatcacaagcccaagaatcacagctccagctgagggttcaccgtgtaatggaaacagaacgtggaggtggaatctaatgacctgactgactgtctgtctgaccaaccaacaaaaaccccgcacagcaaaacaagcaagcaagcaaagagacggacgaacaccagcaccaccactacactcggcggcctaccgtgtgtcggcgccgagggacccgtccttctggagcttcaggctcaggttgctgaaccgctgccgcgagtactgccgggaggccttcctccagtcagtgccggccttcatcatcgccgcgaactcgtcgtagcctatcttcccgtcctgacagaagaa

SEQ ID NO: 5624 - DNA, 1430 bp, Zea mays
  misc_feature (59)..(62): n is a, c, g, or t
  misc_feature (506)..(506): n is a, c, g, or t
  misc_feature (518)..(519): n is a, c, g, or t
  misc_feature (523)..(523): n is a, c, g, or t
  misc_feature (526)..(529): n is a, c, g, or t
  misc_feature (543)..(543): n is a, c, g, or t
  misc_feature (546)..(546): n is a, c, g, or t
  misc_feature (621)..(624): n is a, c, g, or t
  misc_feature (627)..(634): n is a, c, g, or t
  misc_feature (646)..(646): n is a, c, g, or t
  misc_feature (660)..(663): n is a, c, g, or t
  misc_feature (666)..(666): n is a, c, g, or t
  misc_feature (671)..(671): n is a, c, g, or t
  misc_feature (673)..(673): n is a, c, g, or t
  misc_feature (679)..(681): n is a, c, g, or t
  misc_feature (683)..(692): n is a, c, g, or t
  misc_feature (706)..(706): n is a, c, g, or t
  misc_feature (708)..(710): n is a, c, g, or t
  misc_feature (726)..(727): n is a, c, g, or t
  misc_feature (729)..(729): n is a, c, g, or t
  misc_feature (732)..(739): n is a, c, g, or t
  misc_feature (744)..(752): n is a, c, g, or t
  misc_feature (755)..(756): n is a, c, g, or t
  misc_feature (759)..(759): n is a, c, g, or t
  misc_feature (763)..(767): n is a, c, g, or t
  misc_feature (769)..(770): n is a, c, g, or t
  misc_feature (773)..(775): n is a, c, g, or t
  misc_feature (777)..(777): n is a, c, g, or t
  misc_feature (787)..(790): n is a, c, g, or t
  misc_feature (796)..(796): n is a, c, g, or t
  misc_feature (798)..(800): n is a, c, g, or t
  misc_feature (806)..(807): n is a, c, g, or t
  misc_feature (812)..(814): n is a, c, g, or t
  misc_feature (817)..(827): n is a, c, g, or t
  misc_feature (829)..(829): n is a, c, g, or t
  misc_feature (831)..(834): n is a, c, g, or t
  misc_feature (844)..(844): n is a, c, g, or t
  misc_feature (847)..(857): n is a, c, g, or t
  misc_feature (859)..(874): n is a, c, g, or t
  misc_feature (877)..(878): n is a, c, g, or t
  misc_feature (886)..(886): n is a, c, g, or t
  misc_feature (888)..(889): n is a, c, g, or t
  misc_feature (892)..(900): n is a, c, g, or t
  misc_feature (903)..(908): n is a, c, g, or t
  misc_feature (912)..(919): n is a, c, g, or t
  misc_feature (922)..(924): n is a, c, g, or t
  misc_feature (936)..(948): n is a, c, g, or t
  misc_feature (951)..(956): n is a, c, g, or t
  misc_feature (961)..(967): n is a, c, g, or t
  misc_feature (971)..(974): n is a, c, g, or t
  misc_feature (978)..(994): n is a, c, g, or t
  misc_feature (997)..(1000): n is a, c, g, or t
  misc_feature (1002)..(1014): n is a, c, g, or t
  misc_feature (1019)..(1022): n is a, c, g, or t
  misc_feature (1024)..(1027): n is a, c, g, or t
  misc_feature (1030)..(1032): n is a, c, g, or t
  misc_feature (1035)..(1035): n is a, c, g, or t
  misc_feature (1038)..(1048): n is a, c, g, or t
  misc_feature (1050)..(1053): n is a, c, g, or t
  misc_feature (1058)..(1062): n is a, c, g, or t
  misc_feature (1071)..(1071): n is a, c, g, or t
  misc_feature (1073)..(1076): n is a, c, g, or t
  misc_feature (1079)..(1090): n is a, c, g, or t
  misc_feature (1092)..(1093): n is a, c, g, or t
  misc_feature (1098)..(1111): n is a, c, g, or t
  misc_feature (1115)..(1129): n is a, c, g, or t
  misc_feature (1131)..(1144): n is a, c, g, or t
  misc_feature (1146)..(1146): n is a, c, g, or t
  misc_feature (1148)..(1153): n is a, c, g, or t
  misc_feature (1156)..(1159): n is a, c, g, or t
  misc_feature (1161)..(1178): n is a, c, g, or t
  misc_feature (1180)..(1180): n is a, c, g, or t
  misc_feature (1183)..(1192): n is a, c, g, or t
  misc_feature (1195)..(1196): n is a, c, g, or t
  misc_feature (1200)..(1200): n is a, c, g, or t
  misc_feature (1208)..(1210): n is a, c, g, or t
  misc_feature (1214)..(1217): n is a, c, g, or t
  misc_feature (1219)..(1232): n is a, c, g, or t
  misc_feature (1234)..(1234): n is a, c, g, or t
  misc_feature (1238)..(1244): n is a, c, g, or t
  misc_feature (1246)..(1251): n is a, c, g, or t
  misc_feature (1254)..(1264): n is a, c, g, or t
  misc_feature (1270)..(1274): n is a, c, g, or t
  misc_feature (1277)..(1279): n is a, c, g, or t
  misc_feature (1282)..(1284): n is a, c, g, or t
  misc_feature (1287)..(1289): n is a, c, g, or t
  misc_feature (1294)..(1299): n is a, c, g, or t
  misc_feature (1301)..(1301): n is a, c, g, or t
  misc_feature (1303)..(1303): n is a, c, g, or t
  misc_feature (1306)..(1308): n is a, c, g, or t
  misc_feature (1310)..(1311): n is a, c, g, or t
  misc_feature (1314)..(1331): n is a, c, g, or t
  misc_feature (1333)..(1333): n is a, c, g, or t
  misc_feature (1335)..(1338): n is a, c, g, or t
  misc_feature (1340)..(1342): n is a, c, g, or t
  misc_feature (1344)..(1352): n is a, c, g, or t
  misc_feature (1355)..(1359): n is a, c, g, or t
  misc_feature (1370)..(1373): n is a, c, g, or t
  misc_feature (1375)..(1391): n is a, c, g, or t
  misc_feature (1398)..(1411): n is a, c, g, or t
  misc_feature (1417)..(1425): n is a, c, g, or t
tatcgcaggcgcactgccgtaagcacggagcacaatgctcatggtatcaacgctgtacnnnnatcatccgctgtaccttagcatctgaacatatggattggattattcttgttcctttctggagttgttttagctgtatcagcataatttcatcagcgacactgaccagccattgtaattcatcagtgataccaaaaggaacatgactaacccttaccattttaactatggtgtcattatgttgcttgaaatgtctctctagaaagttgaaggctgcaaaaggcaaatagtaaattgaatgttttattttgtcaaaggtcaagaccctaaatacaccaaaattggtgttaccaactgaatgttgaaaggtaaaaggcttgtatacataatgaacttataaaacctccattcttcacctttcacaaatgtggcgataaatttccccccatgtttaactgccattgcatgcatacaaacctataattaaagagtaaagtaagtagtgnctccttccccannagcncannnnttaatcaaccgcanaangtactgtttgcgggatttgagtttgagacactatggtgcaactaaccttttcctgggacttgcgcattcctattnnnnagnnnnnnnnatccactgattnctgaatctcttgannnntantatcnantgatcnnntnnnnnnnnnngcttgtttgatctncnnnaagatggaaattactnnancannnnnnnncgctnnnnnnnnnatnncangacnnnnntnnaannngnaaaaaaggannnnatttancnnnaatttnncgaannnaannnnnnnnnnntntnnnnaaccccccgnggnnnnnnnnnnncnnnnnnnnnnnnnnnnaanntaaaaaancnnaannnnnnnnnaannnnnnccannnnnnnnctnnncccttccttttnnnnnnnnnnnnncannnnnnggaannnnnnngagnnnnacannnnnnnnnnnnnnnnnttnnnntnnnnnnnnnnnnnttccnnnntnnnntcnnnaanatnnnnnnnnnnnannnnatctnnnnntaattccgncnnnntannnnnnnnnnnncnncatcnnnnnnnnnnnnnntaannnnnnnnnnnnnnnannnnnnnnnnnnnntntnnnnnnccnnnnannnnnnnnnnnnnnnnnntnccnnnnnnnnnntcnncttnccaccatnnncttnnnncnnnnnnnnnnnnnncnaccnnnnnnngnnnnnnccnnnnnnnnnnncttctnnnnncannnccnnngannntttannnnnncnancannntnnctnnnnnnnnnnnnnnnnnntnannnnannncnnnnnnnnnatnnnnnctttttcaccnnnnannnnnnnnnnnnnnnnntactctnnnnnnnnnnnnnnttacannnnnnnnntacct

SEQ ID NO: 5625 - DNA, 563 bp, Zea mays
ttctgttgccgcttagaatcctagtacgtacctggtctcaggcgtccctgcggcacctgcaccgacgcctcccgacgagccagcagcggcagcggaggaggaagaagccgacgcagctgcagatgccccttcaggtgctttcgtctcagatgcttcacatgcatgccccctagatgataaaacttcaaagattacgtgcagtagtttgcatgcttacaaacagtatggagaccggcctagctatacaagaatgtatatatgcactaacctggcaacggtgttctatttgatgcagcaaatggagcctcaagctccacaaactcaaagaatgcagcgagcttactgcttctcatctgcgcattgctgtatgccttctaataagtggtgatacaacttcgctggccatgtcaccgtgcaggaattaggtctttccctgagtcctgactcctgactatgtacctacccatgattctcggcaaattatttgtatggtatggtatgggtttctgatgtgccacatcaaacaacattgcttttcgccaaatgagaaagatcagttctcg

SEQ ID NO: 5626 - DNA, 390 bp, Zea mays
  misc_feature (62)..(62): n is a, c, g, or t
cattttcatgggatccatttcctttgagccatggaaacgattgtggaagacttgggctcccncaaaatgtaagttctttttgtggttggcaataaggaactagtgttggactgctgatagacttagaaggagggttgcagcacccactggtctatactttgtgaccaagaacaagaaacaatccaacatcttctatgcacttgcagttttgccaggcagttttggcatgatatccttttgccattgagataaggatatcttttgctgagtggtggcgaaaggtgcataaaaaggtgcacaagaccaaaagaaaaggcttcaatagcctcataattttgggggcgtggtgcttatggcttcttcgaaacaaggctatttttgatggagtaa

SEQ ID NO: 5627 - DNA, 380 bp, Zea mays
aacttccccaagctgcccgcctttatgtggagaggatagaagaacttgttggtgttcccgtgcactacattggtgttggacctggcagagatgctctcatatacaagtaaaagcaactttatttggtccttggttgggcggaaaccaggctgggactcgggagcatttgcattttcttggcgtggtaacttttgatacggtgaagtcactgactcgtggagtgatgttgctcaataatcattaatcagaaccttgtcctaatacagccgctgagacatcagctaaggcgaataagggaaggatgagtcatttgcaccatgtttgaccaccaattgttaggtggtccatatattttgtacttattgtgagactttgtgcta

SEQ ID NO: 5628 - DNA, 350 bp, Zea mays
agccgacgtacctcgccacgcccatgtcgagcagggcgtcctccttcggcggcgaccgtagcagcagcaagggcgtcgacgacgacgaggaggagagcaacaaggaggtgcgggcagacgaagccgccgtggccagcgtcatggacgccggcggacagaatggtggcgagcacagtgagcgccggagagaaggaggagatcaggagcgccgcattcctgaggtgtgatttttgtctcggtttttgctttgctcggagaagctgagctcgcttttgacgctggaaaaaccatctccggccaggagaagagaaccccgacccgagcacgattttggtggggttgtaattttt

SEQ ID NO: 5629 - DNA, 398 bp, Zea mays
gggcgtgccctgccactccttcatccaagtgtagagagaaacccccggggaatatttcttgccattttttctcccgtctcgtcgtcgtcgttctccagtttaatttgcctgcgtgagcgaagggtttcagtccagtctaaccgcgtttgttcagagcctgctgagttccatctcagggcttgaattcggccaatcgaatcaagacagtcgcaaacgataggattataaagatgatggatacatggcgtaaattactgtgaacgggtacgtaatgtcatcccagtgccagtgtgcgtgagccagtagttctttggttccttgctctgtatatattctctctttttttttcttcctgagatcagcaaaacagttcggaattcaatagatgctgctgtaaa

SEQ ID NO: 5630 - DNA, 916 bp, Zea mays
atgttctatgttgtgagatatatgctcaaactttctgttttgttcttttcatgagctctgcagctgaggctactgtaataattgcagggaagcctgattattagtgattcactgaaccataattctatagtcaacggagctaggggttcaggggccactgttcgggtttttcaacataacagtaagtgactactgactaactatgcaagtgctgaggtcagtggagcactgtaaagtctaatgcctttccttcatttctcctagatcctgctcacttggaagaggtattgagagagcagattgcaggaggccagcctcgcacacacaggccatggaagaagatcattgtaattgtcgagggaatttatagcatggagggggagctatgcaaactccctgaggttatttctgtctgcaagaaatacaaggtttgagtttgtttgttttttggtgatgacttgtgtttcgtattaggatcactgtgcatcttaataacggcaataaatattttcctgcatatgggatgtgggctggcatatgtatcattgcagctttcactagtgacttaaacagttaaactactagttttgtattgggtatttgggtagactaaggtcctgtttggaagcacccagtttttaaaaactggtttatagaaattgaggtggttccaaacataccagtttatgactcagtttatagaaattagattctcagtttcttaaaaaccaagaagctggtctctcctagctaaaagatagaaactggtttcttaaaaactgggttgcttccaaacagggcctaatatacctcacatatgaacaggcctacacatatctagacgaagcacacagtattggagctgttgggaaaacagggagaggtgtttgtgagctgctcggagtggatccagctg

SEQ ID NO: 5631 - DNA, 630 bp, Zea mays
tggcgaagccgaggagaggggcgaggacgtaggccacgatcacgtagtaccacttgacctgccggaacatgtgcgggatgatgaccgctgagacgacggtcagcgcggcgtacccggcgtaagctgcccaggcggggaaagacccgtcgctgaagatctcgtcacgctgtaggtcgtcaagcgcggccatttcgtctccaccgtttgccactgttcgttcagtcaaccggcagcaggtgttatatattctctcgatcgatcgaggagtgatgggggaggctcgtgtgctagaaagaaccgagtctgtggtgttttcacctctgttggtagcacgtttgcggctcagccgttgatgcaggctcttaacagtgacaccgaagactttaaagaagtggtatgtaccgtctcccatgatcagagctatgcagaggaatgcctggaaggccagacagaaagacatgtttactgacatatgatctccaatactttctttttttaaagaagaagaagaagaagaagaagaagaagaagaagaagaagaagaagaagaagaagaagaagaagaagaagaagaagaagaagaagaagaagaagaagaagaagaagaagaagaagaagaagaagaagaag

SEQ ID NO: 5632 - DNA, 484 bp, Zea mays
ctcataccgagttggccaatctgaagtgttcttgtagtgatgcctggcttctgatgtgcattgcatgctgtacatgcaggactagtgaagatactgaagaagtatgacaagagaacaggcggtgtgcttagcctgcctttcactcagcgtgtccgtcaccagccatttttcacaaccgaacctttaacaaggcttgtccgagaatgcgaggctaacctcgaactacttttcccgatcgaagcagaggttcttgagcctagttcatcctcgaatctggaaccgcatgatgtggctaggtgtgacccgacatcgtcgcgcgatgtggaaaccgtcgatgtttaccgaagcacactcgcagctatgaaggcgatacagggccttcggagagccagctctacttacaaccccctgtctctgtctaggttcttccacggcgaggatggcgaaccctgctcgggtgccatcacttctgagagctcactgt

SEQ ID NO: 5633 - DNA, 502 bp, Zea mays
cctcatttcctccacgtacgcgtgcatactctgcgagtccaggagatattttcccccttcttcacgatactctcgacgagagtgtctccatggccggaaaaggagacgggccggcgatcggcatcgacctcggtacgacctactcgtgcgtcggggtgtggcagcatgaccgagtcgagatcatcgccaacgaccagggcaaccgtacaacgccgtcttatgtcgcgttcaccgattcggagaggctcgtcggcgacgccgccaagaaccaggtcgccatgaaccccatcaacaccgtcttcggtaagccgatcatcaccaatcttttgttacgtgcgctgtttatctgtttgttcgatccattaatacacggggtttgggtgtgggtgtgggtgtgggactaatacgctgtgtggtttgttgatccgtttgcgcgcatttgcagacgcgaagcggctcatcggccggcgcttctctgacacgtcggtgcagagtgacgcca

SEQ ID NO: 5634 - DNA, 863 bp, Zea mays
tactcctgtgcgaaatcgaggatactgactcagtgtgcctgtggttgggtgcaaatgtgatgctggagtactcttgcgatgaggttattaaacaatgatcagccgtaattgtcagtgctactttagtttcagttcagctctcctcatttcctgagcttttgcaggccaatgccctcttgaagaaaaacttggaaaatgctaaggccagcttagaagtccttgttgctgatcttcagttcttgcgagaccagcaaaccatcactcaggtaaaaattttatgactagggtcccgtttggttagagggattagtccctagtttttagtcctgtttagtccctattttgccaaacggaaggactaaaatagggactaattcgctttagtctctagtccctcacatgggtgctaaaagggactaaatgggcaaatggcaacatttactcaaattgccattgcttaaaaaattggtgtcatacacaggaaacaagaaaagggatatttcggtccttatgtgttatatttaatgtatttagaatctatttagtccctacaactaaacaaggtattactgaactttagtccctggactaaactttagttctatgactaatggtagtagtttgcatgatttggcaatgattataccatggtctcatacctatagtgtggaatgatatcttatcaggttacaattgctcgggtattcaactgggatgtacaccaccggagaagcaaacaggctgtaaaggaaccttaatcagttagatcacgaggtcaaccaatgtgattgggacaaattttttcgtaccttttggtacctctggcagattagtccatcatagcgagctctttgtttgttgat

SEQ ID NO: 5635 - DNA, 901 bp, Zea mays
  misc_feature (884)..(887): n is a, c, g, or t
  misc_feature (895)..(895): n is a, c, g, or t
aataggacattctgcgggttcgccttacatcgatccgagctattttaaatcgctcagagaagtaaattggatgcctggaattatgtttattattctcctctatgaaaaatatctactgccttaagcaggaacctggttctgatggtgccgagcggccataaccagctagtggtgcagcagcaacccctctttgattcagcaagcacctgaagcgtgccaatcttgcagtgaccgatcttgtgtccttcgccagcttctcaattggtgtccatagccgctcttcaaatcagtaagtgatgtggtgagtcaaggcaacttgatacagacaaaactttgtttttttgcgagagaactcaaatcaaaactatacattgttaatgaaatgtaagttatgagcgtttataaacctgatagacttaacttattatgcctttcatactgtgcaggcatgtctagtctattcgtagtctgcatatacattcatgttcgcttaaaataagaaagaacagatgtttcagtttgtcagttacgatgtgaagcgtgtctcccaattctctcaatacaacgaagcacatcagagcatttggttatgaaagatccccattctgacatgctggtagcaattactgctcaaatttttcattgctaattcgcttatatcaagcgcttctgtcctgggtatgcgaagagagcatcgactgccttggctacgtcgtgactgctagtatacttaatttttctacagtactctataagaatctatctgctaaagtattaaggaggtaaaaaataggtcaaaacatatcgagctgatcatacctgcagctgctgcagcacgtggccaaattgtctgctgaatgtctgatgcatcaatgtgttcgccnnnncatgcatncctcac

SEQ ID NO: 5636 - DNA, 832 bp, Zea mays
tttctctcctcacctttcctctcgcatttctttttgtgtgcattgttgccttataacatatatcattctaggtcgtttgctttgaacccttaagtataagattatagtgtcgcaactcacaagtgcacaacttgttttctttctggtcagatcctttaacactacagctttgattcttacacggctaaacattttttttaaaagctcaatcataatttgcagaagagcaatatgattcatgagtatcatgacccatcctatattctctggatagtgtaatacttgcaacagctgtatgttctttgaggtggtctcaggtgttattatgttcctatcatccacaatgtaaaatgtaattgttgttttacttgttgtcaggttaccataccctttatgaatggtaccgaaaagtggaaagcgaacattttcctgatcccacaggacttcgcgctcgtctcgagcattggacctttggactttaccctgcatgtattaagtacctcatgtctgcattcgacatcccagaggttcttccattttttaagctgtaatgagatcatttctgattgttgttgttgtttgccgcttacgccgtatatattctctctttcaggttatggcagtaactagaagtacaatctgcaaaaaaggaatagagtcccttcccaggggaggtgccatcatctattatgtctgtgttttcctgtacttctgggtcttgtcaacacctgtcgtatcgctggtgtttgggagctacttatatttatgcataaactggttccatatccatttcgatgaggccttctcctcgctgcgcatagcaaactataag

SEQ ID NO: 5637 - DNA, 1442 bp, Zea mays
  misc_feature (1378)..(1380): n is a, c, g, or t
gataaggcaaaagaactatcattaaatctcaagagtatcactcaactgtataacgattatgctgttccatttgatctctgggaggtatgttttttcttggtttcgtagaacttactcacgtggccttgcttttgtcaatttaatatgctgtgctgcgtctcaatggttcttatattctcaaactatgcagtatgcactaagcacttccataagactcctactactattgcataataacaaagcttatgaatatggatcattttaaagatgttgaaataagagatataagagtcagatgaaacttgaaacaacaggaataataaaaaactcgacctgcggggtaagacaacccacgagtattgtatatttgtatttaagaagacctcacacaggtcgagaaaccccccgaacccctgccccacccatacacagcggcattgaagcccatgtgagaacgattgcgaccggggccgagccttatacgtgtgctttggcgtgggacagacgaggtgattttttaaccacagtctgaaattcgctcccacggtgagtcgaacctaggacctgaggtgtgctcagaccacctatctaactcagttagatgccctttcgctaaacaacaggaataatcatttgtggtgatagcgctagccaactaagaggcaagcaggatactgagtttgacagaaaaatcaacagtgagtttctgtgagttgggattgtggtactctgggcactggtagaaattaacttctctctcctttgataaacttaattttgaaaggatttccttagctgtgggacttagtatgtattcttgtccttaaatctttagtattgggtgcatcaaactctgtttacttgtaactgtacacagttaggacaaaagatttctaaattaactctacacagttagaactcataatggggtcaggatacgaattctcaacataatcatttcctgaatctaagttttagacagtattcatctgtttgttgcctgacttgctgttggtactaggagttccctgtatctaccaaatcctgcatctatattgggttattagcaaatggtttctcttaaaaagacttggaacatttttttattaggtttgcttggaaatgctgagctttgctaattactctggagacgctgatagcaaaattgttcgagaagtttgggctagactccttgatcaggcacttactaaagggggtgttgcagaagcttgttctgttgtgaaaagagtaggctcgaaacttgatcctgcagatggagcttgtttacctttagatatcatatgccttcaccttgagaaggctgcagtggtaatgtgtattttctgtactttccgtacatgcatacttgagactacannngagagcattccactgtggtactcattatcctgctcttatctacaggatagataagtcagaga

SEQ ID NO: 5638 - DNA, 389 bp, Zea mays
  misc_feature (380)..(380): n is a, c, g, or t
ccggtgcccgctcaccaggaccacgcccaccgacgtcgagcccgtgccgcagagctgccgcgccccgggggagctcaaggtcatcttctgccaggcgaccatcgtcacatgcggcggcgaagcagagcgcaccgtcctcgccgacagctagacagatcgagccgtccagctccattcgcctccaggctccgctgaatccttacagtaattgtcatgctttcttttgctccatgtgtttgttagctttggcttcgacgcgcgtgtactccggtggttttattttagaaatcagcagtgaagcaaaataattgtcttcggatatgttaaactggctgagccattcaaaatccacgaagcgcgagtgaggtgcatctgaatgnggttgtggt

SEQ ID NO: 5639 - DNA, 380 bp, Zea mays
acttgagagcgcagatgcaaaatctgtagtagttgatgaagggaattactcaaatggatccagaaaaaatgaggagaagcttgatcttggttctgtttctgggtcatcacattcagaaggagagtcttcaggagaaaagtcccaactgacaacaagttcaggagctgaaggtggtgactttgaatctggtgatagtgcagagcttgaggtaggaatggtggatcatcccatttctgttgctgctgcttcagaagaagtgacagcagatgaggataacactgcttcagctacttcaaaccaaaataatccagaggtaccacaagttgaagaagtgcggaaagcagacaaggataacactgcttcagctacttcaaaccaaa

SEQ ID NO: 5640 - DNA, 389 bp, Zea mays
ctctggtgggggcgggtgattggatacgcgtgtgcgtgggggagtttagcttcgtgtccccccgcacatggggccatggggggtgctgagggggcgtggtggttagcgactactagtagattagtgtcggggttaggccaccaggggctaggctactggagggagtgtgtataattgtgggaagaagtcacgtacacgcacgcacgcgcgcccggatctaaccaagattgcgctgcgccccccacaaaggctcaggcctcactgacgagcgcgcgcgcggggcaccaaacaaatcatgcagccacacctgcacctgtctactgctgctaagctctagtttaatcatggcagtgcttgcgctaatgctggaactagcggcactaatcaaa

SEQ ID NO: 5641 - DNA, 453 bp, Zea mays
gatgggtatcatcttcagcaccattgttgttgttacatgccttctcaatgcttgattcagttgtcaacatgagtacgatatcccctttgcaaaccaaactgagattagttcaacatgtttccttaattttgcgtctctgcaatgattctgcaacacacttagtaagcaccttagtttcccccctccttgttacttaaacttttgaaagttgttttctaatatatgatacatatggaataataggatgagttgggaagaggagatgctccatctttcatagctttacacatgatcgagaatggtggtaatgagaatgattctcgtaaggccatgcaagagcatatcttgaagtcatggaaagtaattaatgaggaggcatttgatagttgccagtattctatgccctttaataaagcttgtattgacttggctcgcatttcacattgtgtttat

SEQ ID NO: 5642 - DNA, 461 bp, Zea mays
tttctttacaacagcaatagacctgaaactgctatgtacagtattgcttctcgctaattaagtgaactgttacattaggactaacacaacattacttctccctaacttcctgacaacaacaacaaccgagacaaccaaagagactgcagctcccttcgtgagctagctgtggaacctttctttacagcagcaacagatctgaaactgctatgtacatcaagtgaactgtaatattaggactacacatcattacttctccctagcttcctgaaagcccaaaaaaaacaaacaaactgtaagacaatgtcagcgcaaacagatcttagacaaatcgtgctcctgttatatcgacatgacatctcccatttcagtggcggtttaccttgtgatacacgctgaaggagcgctacaaaattttctgccgctggtctaggtgatcaggcggcacggaattagtgaag

SEQ ID NO: 5643 - DNA, 480 bp, Zea mays
tgaaggaataactatactaactttttttttggttttttgagtgttcaaatgcttcaacgaatctttttctggcgctgacaatctatattctcttgtatgtgcagtgaccttgatgagaacctgcagagggaattccacaggtacctggatctgcgtggcatttcacccaggaccacaaatttcttgcacctgtacatgatcaacaaggacagccgtgagtacctgctctggctgagaaagctgaaggatttcttcaagcagtaggtgtgaagacctgaagatcagctttatctctcttttgttcctgctagggccttctcggttattccaattccatgtggattgaagtgtattaaaataaattttgacttgttatggatttaaattaacttaataccacccaatccacatggattattggtgaaacaaacaagccctagtcgaaattcttgttaagttggtagtttgtcagacccgaaa

SEQ ID NO: 5644 - DNA, 391 bp, Zea mays
gcagaagattccgatgccagttgctactggctacataactcaagaaaaagaaaacatgtttgcttctaaatcatcgattaattttcccctttattgtaccaggatataatccctgtcgaaggcctgaagctagacaacattgagacgggaatatacatgctgcattgtttacctctcagactggttggagccgagggtgcaccgaccagatgcatcctcatcaagtgatcacccccctgctcttgctggaggtgacattgtatcatgccagctgagctgatgcttcatcgtggccaacgcattgattcgcagtcttcgtcttcgtctatatgaaacatagtgttgtatgcccatgtagatatgcttgtacggacaatagagacacagcaat

SEQ ID NO: 5645 - DNA, 389 bp, Zea mays
  misc_feature (381)..(382): n is a, c, g, or t
acatgtgactggacttgattctcctgttaccagagtttgggaaagcaaaagtaaaggaaatgctaccttatcacatatacatcacccactcgaatctcctggtttccatagagcaaagaagaacagaagtcatgtgggaaaactgaagatgtcaagaacttcttcaggaagaaaaaggtcaaggtcaaatgctcagaagcctcctatctggcaagaagtggagagatcctctttctctgttggtgatagtatggacatactaaatacatctgcaaatgatctaaagacgcatgagctaggcgaggatcctgaggtggaaagtatggctaggatgtttagtagttcaaatgcttcatctttattgttgccatcaagtgactnntgcatat

SEQ ID NO: 5646 - DNA, 1219 bp, Zea mays
tgactactgtggtacatgcttaattttttttgccctatgatatctttagtttaaaacttcagaattctttaataaggttgccagtaatcagtttctatttatttatgaatgaaaaagtatgttctatatgctctaactaatgactggctgtactatttggttgcatttagggtttagttccgcggatgtgtttgaatagttcattattaacactatactaaatgctagctgctctgcgtattcaggcactgcgccaccttagacaaattgctcaagaaacaagtggagaagtagtgtatgccttgggaaggcaacctgcagttctacggacctttagtcaaagactaagcaggtaatttttttattgaactttaaccccgactttcatgtacatcttgctgtctagtttaaaacataaaagtctcttgttcttccattagggggtttaatgatgccattagtggtttcaacgatgatggttggtctgtaatggggggagatggcattgaagacgttgttgttgcttgcaactcaaccaagaaaattaggaataatagcaatgctgggattacatttggagcgcctggaggcattatttgtgcgaaggcatccatgttactgcaggtaagggtgatcattattcgtgtgaaggcattatttatacagtctttgcatattttatatttagaaataaagagggaaaagcaggaactattgcatgttgcattgtgcacaaataaacaaatgaattgcagagttttgttatattaccttgtacctcttaataaaaaacgttatatcatccttgtttgatttgcactttattgaatacatttcgggttgtgcacgttatttatagtaccaactatgtaccgagagctacagtaacttctgaattttgagactgatcttgtaccacaatcagtggtaagcagaaggaggcgcaacagatgactttttgattgtacataaacattgtacactagatatctaggaattctgcttaaatgcagtggtgggtgcacatttgacactagaaatttgagtttcacccctgtaaggtcattggaggagctccagcccagtttgaaaataaaaaatttgctactgatataaatgcttttaacattatttctgaacctacctttcgtcctttcccatatggtatgcctttttaaacatgtttctttattggtattctagagcgtcccaccggcag

SEQ ID NO: 5647 - DNA, 364 bp, Zea mays
tcatccgacaagaacagcttcttgttcatctacactatctgcttgctcctcgcctcatatcttgtcggcgtcatgctagtccaagatttcatgcaactgagtgacaatgtggttaattttctcactgtcattctactcatacttcttgttttaccaatcgtgatccctgtgaccttgacactgtcatccaaaacacaacatccaattgaagaggctctcctttctgatccatcaaaaggagagacaagcacttcacaagagaaagaggatcaaccagaggtcattttaagtgaggtggaagaggagaagcctaaggacattgattcattacctccatctgaaaggagaaagaggattgaagagt

SEQ ID NO: 5648 - DNA, 408 bp, Zea mays
  misc_feature (393)..(393): n is a, c, g, or t
agctctcgagctcttcatgttccccaactgcgagtacaactcgctgttcgtcctgcacaggcacacgagggagcactcgtctaaggtcgagtgggccaaaacggtcgacgagatcgtggagaaggggctgagggagagtagaggagggttggggctgtggactccgtaccctgcggacctcagctccgtggaactccctgctgtaagaagaacttcgccggcaggataaggctaggctgtcaaagaccacaaagctcccagcctagcctgccgagcctgtggtctttgattcgttcatggttgtacagagtagaactccactgtttgtttgttttttttggcgtagattatgtaggctgacgcttggagtttgttgctttccagttctaaacngttgcttccagttct

SEQ ID NO: 5649 - DNA, 477 bp, Zea mays
gcttgttgactacttataatgaatcagtggttagcagcttctgctggtttatccaaggttttcagttaggtgcagaaactacacttcttttttctgggctatataattatttatacatgagaatgagatgcaagaactgagttgatattgagagttctggtctcaaattgcagttacgttctttgagttctgtgatcttttgtgcagtgcgacctgacgttgatattgcgtctctttttccttaacctgacaacgtagtacatgaccatcgtatttgtgcttattatgctggaaggcgcaatcactatggatgtatttctgaatagcaactgggaagaggtaaggagctcacagctcagctgtgaactctgatacttatgattttttttccttatctgctactttatgtcatgacggagtatttggcaattttcgaaaacttcaggatttccccgctgacccatcaggcaagtttga

SEQ ID NO: 5650 - DNA, 485 bp, Zea mays
acgcgtatacccaggcggcggttgaggaagaggaggagaagaagaagaagatggcttcctccgcatacgcctcatggtccaagcggtggatccgtcccgaggtacgtacgccgttgctgtttcccatctgatcgttcattcggtttctatcgatcggagaattgggtcatcggggatggatggatggatctgacgggatttgccgatcccggtgtcgcgcgcgtccatggatcaggtgtacccgctgttcgtgccgatggccgtggccttgggcatctgctcgtaccagcttgtgcgcaacatcacgggcaaccccgaggtgcgggtgaccaaggagaagagggcggccggcgtcctggacaaccacgacgagggcgagaggtacgctatgcacggcctcaggaagttcgtccgcgggaagaagcccgagatcatggcctccatcaactccttcttcgccgaccctcccaaggacgattaagcta

SEQ ID NO: 5651 - DNA, 406 bp, Zea mays
ctctgttcttggcttgtcatcttgtcaatgcgtcatcttgcacatgtgagctagtaagtacaaacaacaaacgaaaacaaaacattcgattgattttttgatgcgccaaagacaaattttccgccaaacaaaaaggcaaacgacacaaaagagctagagaacatctaaaaccaaaccccgataacaaatgatcatggtggatcaagatccaaaacccaataagagaacaatcttgaaggacaacgaacagacagctaccagaacggaaaaacataaggtagagatgcaaacaaaaatgaaaggggaaaccaactcaaagaagaaaaaaattgatgaagatgcagatcaagatgacaatgcacctcaaactcaggtagtacttaccctaattcatcattgtctgctc

SEQ ID NO: 5652 - DNA, 307 bp, Zea mays
gctgctgatatatggtatggtatatcggatggtaaaatggaacgtcgtccagcagttgatgccattgccacgacggtggttgcttgcacgctggtcgagcagcacaaggcgcgcgcggtggtggcagggagatgcgcgcactcggctgcgaatacgtggagatgctggagcatggaggggacagagactctttgacaatgtacgtagctactatgggatgatggaatggaaggatgcacgcatacctgatcgaccgaccgaggacctgtgctggagcctctgaacacacagcagcagcagctgctgc

SEQ ID NO: 5653 - DNA, 377 bp, Zea mays
tgatggtgagagtaaggacggtcaagaagagaagcctgatggcgatgccacccaggaggagcaacctaaaatagaggagaatgtggaagaaaatggagagaaggatcagagctcaaactccaacgaggtatttcctgatggggcccaatcagagcttctgaaggagtcaaatacccagaacggttcattccccacacaggctgcagagtcaaagaatgaaaaggaagtccaagcgttaccgaagtcttcaggtgttgcaaccagctatacctggaaattatgtaatagtagtgcctcaacagattacataccttgccttgacaacgagaaggctatcaagaagcttcgaactaccaaacattatgagcatcgtgaga

SEQ ID NO: 5654 - DNA, 515 bp, Zea mays
  misc_feature (505)..(505): n is a, c, g, or t
  misc_feature (507)..(511): n is a, c, g, or t
gactttaaactgcacctttctactttcaagaacctgtccattttgtattgtttggattcatttgtttgcaccttacttgtttatgcatatgtttcattatttcagaagtcattgatatccctgcaatttctttcttgcagatttactccaaatcaacagatgtatttaatgaacgatggcagcatgcctggattattcctgccttctggcatgtcttgtctttcttacttctttgtgtcatttgctacctgtgggcaccttcacaaaactcaatgaggcacgctcctaatctttttgtaactttcagctgggcaatgttttggttatatataccatctttttggtatttctggttaactatagaaaaaagcttatagcttttggctttccttttcagattttcttatgatgcaagtgaattctttgatcgaaaggataatatctcattaattaggccagcacccagtgcatccaagaatggatggaatttatcttctacaccagngnnnnnaaag

SEQ ID NO: 5655 - DNA, 395 bp, Zea mays
ccgctgccactgcaagcccaggaccgaacgccgcacaggcagatggcaacggcgacgcacaaccccgccagctttagcatggatctgccacaccacctccacctctgcatctgcctctgcctcccccgggagcactccatgtccatggtctgcagggaaactcctctttttcaagccgccgcagcaaactgtgtagaggcggacgtcggcaggcaaccaaatctaggaaaccgagaggcacggggggagggcgtgcgctcgcgctgcgcaccttcactgctgcattgtaatatagagcagagccccccgcctctagctgcgtccctctcccgctcaaacctcagcgcggctacctcaggcaacctgatcgtcaagtttaatggatcagcgagaag

SEQ ID NO: 5656 - DNA, 618 bp, Zea mays
aaaagatgaatcccgtagactacaataaccgacatcatcaggatatacactttacatgtaaagacgaaattgctgctgtcgaggagagagccttaattacagaaatgaacttcagagacgcttcttcagagaaccacttaagtttccatgtatgtactgtgccgatttcctcagactgcttgttttgaggattttggatgctattgtgaaactctcctggcctaccattatccaaaatcaatgtcaaacatttgttgttgcgctgatccatgacctgaatgtacacattgcagaacaaaatcaactttctgaatgaccactcagagtttgtgggggcaataaacaaaacaagaagcacaagcaccctgtgtccatgccatgaatatgataaggactaccatcataactacaatatttcaagactcattaaggtagcaagtcaccacccatatatagccgcaccgtaaccacccagacagtccttggaaagccttctcatacagattaagaaaccccctaaacccttgcaccacccatacatagcggtatcgtaggtcatgtgagcatgttaggggccgggacttagacctatgctttggtgtgggacaaacgaggctt

SEQ ID NO: 5657 - DNA, 854 bp, Zea mays
aagggcagggatcaacaggaacatctgattttgctgtagcaaaagatggaaaccttataataagcatgagcaagcagaacacaattcttctatttgatagggagacaaaacaggagagaataattgaagagggtagtacaattacttcattttgtctatcagaagacggtgatttcctgcttgtaaatcttgtaagcgaagagattcatttgtggaacataagaaatgatcctgttcgtgtcaaccggtacaatggtcataagcgcacccggtttgtgataaggtcttgttttggcggatttgagcaggcgttcattgctagtgggagtgaagattcacaggtatgatgattgatgattgccttgtgacccacctaatggctatagtatgcacttacattttgttgtcttttatgtgctgtttttattaatatgtctgttactcccagacaaatgctgttctagacaattatttttgttgtccaacgagtcaaatctaatagagtatgcagctaccctgtgttccaaattatgtcattactagacatagcgtatatctaggtgcatagcaaaaggtatgtacctagaaaagccaaaacaccttatagtttagaaacatgtttgtcatttgaaccatcctcattgcacaagtgcttatgtctgcatgcagcatacttgacacgcacatgctagtttcaaccacctatcttctatagtttcatacattcggcatgcagcatacttgtcacttcctatcagtctttgaccaaaccatgctgctggtttttttcagtatgttataaatatgttgaaattgtctgtttctttcaactgaataatatgcaacacttgtca

SEQ ID NO: 5658 - DNA, 393 bp, Zea mays
  misc_feature (382)..(385): n is a, c, g, or t
acgcgaatacatggctacgttaagtacagcgcgttgcgcaaatacaatacactagagaattaataacgtacaacccagactaaaacgcacgtgactaacagagtctatttattataacaaagaagaaataaataaagccgagaagccggaacatgaccgcgtgcccaaacgagctgtgcagtgtgcaaccggatcaaccagccgtacggttggggcttgctgccggtcatgccctagcagaccttcttgcagtagcacttgcgcatgacgccgtccatcttgcactcgccgcctgtgaacttctccgtcttgcatacgttgtcgcagttggtgttgctgaggcacacgcctttgaaggcatggctctgcgacaagcagagcnnnncttccaca

SEQ ID NO: 5659 - DNA, 374 bp, Zea mays
acacggtttgttggcaattctcggacaagaccccatttgtaagccagatcgactcccaccaactaaggcacacaggtactagcaaataacaatataacatgaaagtatgccatgtttgccggcacaagcgccagcatgcaacgcacgctttgaaagttccacaactcaaactcaacaaaaggactcgttccattatttagacatcagacacctatcatgttaacagaaaacactaccgaatacatatggcctagaatccacacggcctcgcatggtggtggtggacacaaattagctcctcttgttggcgtagctgtcaggctcatcgtccttgaagagatcatccatgatttcatcattcttgttaccgtcac

SEQ ID NO: 5660 - DNA, 620 bp, Zea mays
tctctcaactagttatttctatatatatatatcctgcattgcgttgtgtcatgtcatgtgcggccgcgttcctctgtgcctgacgtagtgacgtacgtgtttccaggccgatccttcacaggttcgcgaacgaggacgtctcgctgggcgcgtggctgatcgtgctcgaggtcgagcacgtcgacgaccgaagcatgtgctgcgcgacgcctccaggtgggccatgaaactgacagcatcacctccggcggctccgttccggaataattcacaccaacggcgagcctgctgcatggcatctctgactgtgtgtgcgtgtgtgtcgtctgcagactgcgagtggaagaagcgagccggcaacgtgtgcgtagcgtccttcgacgggtcgtgcagcggcgtctgcaagtcggcggacaggatgatgcggcacatccacagggcgtgcggcgaaggcgacggggccgtctggaacgccgccacgtgagattgcccatctcacatcgggaaccccaaccgttgctgtatgtggaggtggagcttcactcggcatccgattttctgaaaacgccaaggcgagagggaagcgaggtcgttgatccactgtttggcatattgagcat

SEQ ID NO: 5661 - DNA, 380 bp, Zea mays
tcttgttttgttgatgaactgtggagcagctgccttgcaattcgccaggacggagggcatcatcccggcgccggagccgacgcacgcaatcgccgcggcgatcagggaggcgctggagtgcaagcggaccggggaggagaaggtcatcctgatggccatgtgcgggcacggacatttcgacctcgccgcgtacgagaagtacctgaggggagacatggtcgatctctcgcacccggcggagaagctggaggcctccctcgctgccgtgcccaaagtctgacggcgttggagccaacagcacatgcgactggaatgggacgaataatccattgatatcaggttcatgaatcttgtggtgatccatcgcccatcggcagtgg

SEQ ID NO: 5662 - DNA, 475 bp, Zea mays
ttagttttaattgcagttagttaccgggagatcagatatttttggcctgatgtgaacggtttcatcctctactttctcaacccaaccctccagatttttcaaatcgcctttaataacaatgacggcatcacccttcataaagtgtccttttttcctgtttgcaaacagagtggacaagctagccatgtcgccattcatgtcatcaccaggcttcttaaacttctcaagttcgtcaaaattcggttgaatattgtttgtgtggatcgatttagtggagacagatttgtacaagaaaccatctttgaacttcaaattatcaacccactcaaagtactccccagattctttatctcgcctccgttccacacgaatatgcatctccctgtttacacaagattagcaaacaatgacagaaacagttagatcaattcacaaggagaaacatgtcacctcgcctcatcgatattgaagaatc

SEQ ID NO: 5663 - DNA, 577 bp, Zea mays
cgcagcgagagaaatcagcgagaggtaactagtgagatgagatgaaatgaaagagacgggcggctctccaccgtgctgcggcacgcgtatcctgatggtgtagatgggcgggtcggctttgccccgctcctgcagcgtcatctgcctcggctccccgccgcacatgatgggctggttgaagccgccgttgaacgccacgccgaacacctcgttcggggccatcttcgtcgccgccgggttgtagaacagggtcagcccctcgccctgccaaccatcccacgcacgcacgtatcatcagcgctagctagaagaagcaggatccgatccaatccgcatcatccatggacacggactcgacatttcgaccgaccgactgactcaccggcgagggcgggaggccgctgctggtcttccagtagaccggcgcccgcccgagctcgaactccgcccacgtcggcagcgacaccctttgcagttgcaagtcggtcggaggtcacgcacgcgcgtccagcagcagcagcagcagcatcgatcaattagctacaagagcagcagccagcttatttgttacaccact

SEQ ID NO: 5664 - DNA, 630 bp, Zea mays
tcgccatcttggagccttggaagatatatatgaaaaacagaaggattttgtaagcatttgaaactatagtacctgcttattaatgacttatttaaaagtttaaagtaaaagtgtcagtagattaagtagctccatgtgctatgcagatagagacatttatggctcagcagttcttatttcaaaggcaatggcagcggattcgtaaatatgcacaaaagctgggtatcagcatcatgggtgacatgcctatatatgttggctaccatagcgcagatgtttgggcgaacaggaaatcatttttgctggtatgcctcaattattttctcaaagcaatcttacttttattgtttgggaacttgtaataattgtgttatggttctttactgtgctctctggttgtaaaggacaaaaacggtttccccactttcgttagtggcgttccacctgatgcatttagtgaaacgggtcaactatggaacaggtatcaatatttttgtcgtccatattcggtgtatttattatcctgtaccacagccacagggcatctcattatcgcttacaattttgcagtccattgtacgactggaaagctatggaagcagatggtttttcatggtggataaagaggat

SEQ ID NO: 5665 - DNA, 540 bp, Zea mays
ctcttgagtctaggcatagctctgcagaaggaaagttgggagcagctcgggaacatgcagcatctgctcaagatgaggctgcagaatggaagaagaaatatgaaatggctgccgtgcaggctaaaactgcattggagagactagcatcagtgcaagaacaaattaacaaaattgcacaagaaagggaaagttctataagggcagaatttgcctcacatttggagggaaaggttctctctaatctatctttcaatttttttttatctttttgatgtctttcggtatgatgtttcatgtgtatgacaacatctcgttactgacaggaagaggaaataaggaaattagttgctaagattagagaagcggagagtgaagaaagtgtattgactgaacgcttgctggtagcgatgacttttctgttatttcaatcttcccttgaattgatgcattctgagatgcaagggtagttttataatgcttgaacattattcaggttgtggaatcaaaaacacaaggccacaacaaggaaactacaggctt

SEQ ID NO: 5666 - DNA, 246 bp, Zea mays
cgtcaggctggatcagatggaagcagtcagctgattctaaaagaaccttctaccaatgttgtcctagctgatcatgttacaacaaagaaatgggagaaaattgttgatttcgatgaccaccttgatgatattagcaagtaagtaaaatatttttcttacaagcacttggagatcatgcccgaaaaattataatattaataaaaaactagtttttgtgtgtgcgtgtgtgtgttttaagaggggggg

SEQ ID NO: 5667 - DNA, 1075 bp, Zea mays
  misc_feature (15)..(15): n is a, c, g, or t
  misc_feature (1042)..(1044): n is a, c, g, or t
  misc_feature (1068)..(1070): n is a, c, g, or t
taactctcgtcatcngatattgctggacttgatgtcacggtgcacaacttttggttcaattgcctcatgtaagtaagcaaggctgtagatttagcactcaatatcaaatttatgttttacaaccagtgacagatagccaagaaaataggttatctaatcgccaaacaggggatgagtatgttattccaaataaaaacaaaaaaaagttcaatataataaaaaatcatgatgaaataataatatggtcccagaaaatgacaagaatcacaaagcagtctcacgaaaaaaatggtaggatccacaagatagtgacaaggactgcttcagagctgatctgggtcaaaacttatatttgttcgcaacagtatagatgatgatttgaagtgactagtaaacatagcagctaatcaagaagttgctatgattgagatgtgtaacaatcagatttgccattttgttagccttcgatattaactggtacagatccagtcaattcacactttggattacaaaaatggtataaaaattgcattgctgaaacaaaaacaataaaaaacagattatattcggttaaggagttactcacgcctttgcagttcccagaaggattttcatgcgagccaaccaagtgagagaactgtactgggacaattccccatggagccaactttcaagatttccattattcacatactcatacacaagcatcctggttgcatatacatgtcaagtgattcctgttaatgacttccctttctcttaagtaccaaaagaataatgcataggacatcatattttagagaaaaatgaaaaaggtgtctttgtgttcttacctttgagtaccctcaacacagtaacccaaaaggcggaccaaattcttgtgacgaacatggccaattgcctcaacttccactctgaattctctctcagcctgtcctctgcacatgacagacaattccactgtaagaaagaaagcagaagggcaaaggcatgtactgccactgcttcaataaaaaattgctacagaaaaagctcacaaatnnnaaggattttctgacagcaactggnnnccatg

SEQ ID NO: 5668 - DNA, 470 bp, Zea mays
ggggtgtgccaagtggtggatggcgctgcagatcatggagaagctggagatcgtgcgcaagatggtgtcgagcgcttgcggcggcacccctcttgacagaggcacggtgttcgccaggaaggtggacctcaccagtgtcgacggtcaagcgctcgccggccacggcctcgggagcaacctatcagttgaggacgttcatggcttcatgctgtttacgatgaatataatatgcttgcatgcatgttgtttcttaattttgggtgaaacgaacacaggtggtgatcttcgtgctgctcgacaacgtcttcagcaacgtcaagtcggacatcgatggcatggtctctgcttccactccttattagccatcgtcacctagctacctacgtgtctacaggatcgagatttgcagtcactagcctcaagtctccaagtgtgattggatctctgctgcagtgctcttactactgccc

SEQ ID NO: 5669 - DNA, 358 bp, Zea mays
gaagcagcagcaccttctaacgaggcctacaagtgaaaacccaccgtttcagtaggttccattgttcatagtagcctgacatccttgtgctgcttcctgctctgtaagcccatttgttatttaattcattcaattagttgaaattatacgctgtcgcactggctgatcaatcatgttgtagaatggtccaggaacccccttcaattctgtttgttttgggctcgtttcctgtttctgtgactggtatcatcagggcatttgggttttggagtgaaattctctggtggtgctttgttgttgttttagctatgttccttcatggatcctctctttggaacacacatatgtattctcgtgc

SEQ ID NO: 5670 - DNA, 1129 bp, Zea mays
  misc_feature (1124)..(1124): n is a, c, g, or t
  misc_feature (1126)..(1126): n is a, c, g, or t
caagagtggctaagtgagaaatatggtcagaatggtggtgatgaggaacctgaagaatctgaagcggaaaaagaggaggtacgcacctattcacttgtctgttctgcattttcttttctctgaactttaggaactgggttcagctgtagcaagtggagacattgaattgcctgtggttcgtgaaattaatgcaggcttgttctggtatgattggtttctcgatctgaaaccactgtttggtggttttgtttagaatcctgctggatgctgcattttttggaatttagtgcttgattggttgtcctactgagccacttacgcagtcaaatttcaaagttacattttgtaccatgctatcatcatatcatggattattttcctttcaggaaatataatttataaatgactgtagtatttgctccgtgtccgcgtgctaggttattataccgcatggtgaagctgttactgtggagagctttctggcttggagagaacgctttgaagctgagttggccttacagcgtgctaagtaaaatttgtattttgtttacatattaagtttttttatgatcagatggaatctcttgtttacttgtgatatcttccatctaatggtgtttgattcccatattatataagtacccaaatctgtgtttagatgatcttttgcattttctgggcacacagacttatgccagattcagctcttacagccacaaaggaaaagaaactcacgggacggcagtattttgaaagtggaaggcatgcagtggtttgtatcccagataatactacctttttgttatcccagataataaaactttcgtctcaaggcttgtttgatgcactcgcattcagctattcacatcaatctatgtgtgtgttggagttacttacgtgtcttttaagttctactttacatgaagccatcttttcagaaaggagcaagcacagttgctgatgaagatgaagaagaggaggaagacattgatttcgatgatgattttgaaggtaaaacttctggaaaactctttgtttatgacaatagatgtactttgctagtgcaaccaatcttacaaaacttgctgcctctaatttggtacagacgacgaagaggacatgcngngca

SEQ ID NO: 5671 - DNA, 496 bp, Zea mays
aactaatcaaggtccccgattccccatcatgaactatttctcagtcaaatccgttgtttacaagactgttcgttcattatctcatccatttcagtcttcaaaaaaaaaattaacaattgcagggcgacatcagggccttggaggacctcacgtatgccaagagaaaggacttcatctcccagcacaaactccccatcgatgagctgccgatcatctccttccacaccgaagccagcaccgcgcccacagcgctcgcgtcgctgacccgtgtcgcccaagccgagctcctcccatggctacccctgccacggttcttcctgtctgcatccgagtttgtcgagtcaatgctcgcctctctgaaggtccccgtggttgcgcctgtgtctgcagccatggcggtgacagccctccacctgcggctgcgctatggggagaggagcgacgggctggtgacacggcgcgacgccgaggtgcctgggtcaggggtagttaaacc

SEQ ID NO: 5672 - DNA, 388 bp, Zea mays
cgcggcgatcagtaacacatagtgcatgggatctttcagcttctaaagatcgtgaaagacgcgggtggcatcctgtaacatataaagtctctgatgctactccaagacttataaaatctataaaggtatatagttttttttccaaatctggacactatttttgtttaggacttatatatatttgctaaaacaacttaaaaaatgacaacacttttggcgccagcaagcttggctagggttgttttatgctcaattaaaggggaaactaaagggtccatcaccctttgtattttggtttgttttgccttaatttgacaagtaatgcagtcacatcacttgctataatgaataaagcaacaagcaccttttataggaaaaggaggtggag

SEQ ID NO: 5673 - DNA, 487 bp, Zea mays
cgcagctgttcaaggtggattctcacagggttgccttagtatgcctgttgttcccttgacagaacagcctctttttgggcatgaaagacagccaattgatccaagtgaccaacctttggaatttaacagtaggaaagctcctgatttggcagtacatataaatgtcaattccaatatcccagctcctcaaacactagcacctaatcatgatgtagctgcaacctctacacatccatggacgccatctgctacagtagggttcctgcctcgagctcctgtgccaccacaaacagcacaggtgtgtacacatgtttgaaattgaattactgaccttttctcttaagtccccttacacgagttattctactctttttgaacctacagatggatccttctgtgcatgctgcaccactttttggagcagcatctagttctagttatgttccacctgcagcatttggtgttggtaatgtaacaattcggcaca

SEQ ID NO: 5674 - DNA, 385 bp, Zea mays
cttgtcttgcaaagatttctgcaactaagaaccatagagaaactggtgaacttgctggaccgcaagtctttgaagaccaaggatctagccatgcaatttctggtggacatcacggaggttggaaccaaaccctgtatcgagagaatgctcgcttctcagatcgtcgagaagctcgtggcccttgagaaagccggtgatcctttcggcggcgcggtgtcgaggtacatccagggattgaacatgtgcaagaaactccagtctgctgagagggcggtgatgaagcaacatattctgaggaaggtgcggtcggcagtgagaggtcataagctggaggccatcctagtagcttctgtggaggcctccatcgctgaaggcttcaaaggag

SEQ ID NO: 5675 - DNA, 390 bp, Zea mays
agaaattgtgacagccttaaacaaggaacttgaagcgttagcgaaacagttgcaggttgattctgaagcaagaaaaagtctcgaatcagacctggaggaggcaacaaagtcactagatgaaatgaacaatagcgcgctgttactgtctaaagaacttgagagcactcattctaggagtgccactcttgaatctgagaaggaaatgctacgcaaggctctagctgaacaaacgaaaatcacaaccgaagctaaggaaaacacagaggatgctcagaaccttatcacaaggcttgagacagagaaggagagctttgaattgaggtgtagacatcttgaagaggaattggcgttagcaaaaggtgagatactgcgcctaaggaggcagattag

SEQ ID NO: 5676 - DNA, 359 bp, Zea mays
tggaaagcagcccattgaagtcccaccgaatgttactctcacattagaagagcagtttgtcaaagctaagggcccactaggggaattatctctcagcttcccaggtgatgtgaagattgtgaaagaagaatccggtaacctgagagtttataagactgcagagaccaagcgggcgaaccagatgcacggtcttttcaggtagacaattggaaactgtaatatgattttgcccatattagtttttactgatttacttctcataatgtgattcactgtttcactgcctttattccttgttgtgtatgccttctcctgatattcctaaaagcaactcgctaacttctgaactgtctgcttaa

SEQ ID NO: 5677 - DNA, 400 bp, Zea mays
ggctgagagcgccgtcgcagggaggtgtggtggctatggagtttgcagccagtatcagttcggtgagctcatgagctcgtgttggcaacctgttacgcggcaggatccttgttccgagtccgagtcggattctagtgaaagctcttcggatgcgtcgatcagtgacatcataccgatgctcgacgagctgaacccgcctgtggacttgggtgctggccacccttcctcagccttcagagagaagttgagcgccggctcatcggatgatgaagatggctcggaggaggacaataaccttagctcagatgaagatggagaagaggaagaggaggaggaagagaaaggtgatggaaacaactggaagggctctgtggatccaaactctctggaagctgaagaa

SEQ ID NO: 5678 - DNA, 933 bp, Zea mays
tactgccccccgccccccctctttgtgttctagctaccctagtttataacatggaattccttgattgttttcggcaatagcaggttttgtaaatcaagtgcagaattaccacattaagctataacaggttttgtaaatcaagtgcataattaccacattagtgaaacacagttgtttacttgtttttctcatttgacaacgaaattgcacaaccgtcgccaacaggacgatactctgttactagaatggttgtgaatgctgtttgccccattttccatcgatgttttagcaagctgatgtaatcaaggcatatctgattaggttactatcttctgattaatcatgttgtaggcagttgctgtatgctacattatgtttccttatagtatcatcggattaccaattccatgttcaactaagatatgccaaaagaagaactcatgtcaacttgcagttatgttaccaatttcatgtgcagctaggatattgttgttgcctgaatttgttccactggccccatgtcactgacagacttattcctctaggaagttctttcggagcgtccccgcgtggtatcctcgcaggtttcccatgcctgggacctgcctcagaacacatttggcgcggcgtatgctcagttcatgggatcaaggaacttctcaccagacgatcgcccgcctgtccgtttcatggacaccgatgagctcgcctacgtcgcgacacgtgctcgcgaggtgcacgacttttggcacgtgctgtttggtcttccgacgaacctgattggggagaccgccctcaaggtgatagagtttgaacagatgttcctcccaatgtgcatgctgtcagtcgtcgggggctctgcgaggttcagcgataaacaaagggcgctgtttttccagcactacttcccatgggcaacaaaagctggtctca

SEQ ID NO: 5679 - DNA, 520 bp, Zea mays
tgctgacaccagttgattcaagtgttgagacagaagtaagcagcatgcactatttattttctacatggctctctgattcagtcagtcttctcctagctatgcatgtattctttttaacctgttcagaaaatctatactcaaccttttctgcctgtaaatataacataatcattgtgttgtattcttttttctgcttgatttggtaggtcagaaatgcggtcagaaaagtagagatgaagagcaaagaatgtgcctatcaagcatggttagggtactacaactcgaacaagaccattggtcgagataagtccagacttgttcaccttgcagaagagttcagccaaagcatgggtcttgcagttcctccagccataccgagaaacattcttcgcaagatgggccttaacaatgtccctgggcttcgttcatcataatctcgatgtcacgatatcaagcagaagacgtgtgctacagcacagtacatgcatttgaccagccataatgctgttaacttcgtaaa

SEQ ID NO: 5680 - DNA, 380 bp, Zea mays
aattaattttggtggttgacgaccaacacaaacacatggactaactagttagtctagaattcatctattacaggtgcataaggttcaacacaaaccaagaaagaaatcaagttagggacacaatttaattggagcaaaaggacttgagtgcgctaatctttggcgcactggacactgtcccatgcgccagccaggcgccctccgaagcagccactcttgggaagttccagggcagcctccgctataattcaccggactgtccggtgggccaccggactatccggtgagccagcggagcaacggcttcctgcacgccaacgatcgactgcacagtgtgaacaatgatgaacagtgccacgcagaagtcagaggagcaaagt

SEQ ID NO: 5681 - DNA, 375 bp, Zea mays
atttgactacctgagaggtggtgaaatgtatcactgtaaatcaaatttggatgtttattgtgcaccttctccaaatatgcaccgggcatcaaacattgacgaccatggttcagtaggttgctctgatgttgctgcagagggtcaacggtccactggaagcacagaagaaatttttgtcagggatgggatcctagtaggtcacgaatactgggatggcaaatacatttgtggcgatcactcactgggtccagttgcccttttctgtgcagattattaccattctgggaatgatgtcgacctcagtgaagctacaggtcaagagagagagctgtcgaacagagatagcacactccaccagtcgcttgtagtggaagt

SEQ ID NO: 5682 - DNA, 1068 bp, Zea mays
  misc_feature (1025)..(1029): n is a, c, g, or t
ttgagatgtcgatcattccttaacaagtaggataagatcgcacacagaaggtaatatgttggtgaatatgggtacgtccttgattatacgtaaatttaatccgagtcctagtagaaatgagttcaagttaaaggccgcactgttggaaagggctcagaatataatgttacatggtcacaagcgctaaacgatggaggggggagaataacagtccacccattagattgggaatttcaaattttatagaattgtaggtattcccattagaccctatgttgatagaatttatacctacagccagctcgtgttctgtaaattcaaccttgcttttggattttaacctctagtgtgtgtggtttagtttctgaaagcaaatggaatatatgtggtccaacaatactgccaaatgatatacagccatttaccgacggcctacctgtgtaattttcggtaggtcactgttgttaaattgttcaacttgtgccaacccaaaaccagaagccctgcctgttcggctggctggctgcggtgtagcagccaactaactgatctgactatctgaggaggcaaatagtagtagaacgctagcaatagtaaaaaaacaacagcaacattagcttagaatctgaagcgctaagcttctgtattacctctctgggaaagcctccaattactaatcattggagtaaggaatttggtgcaactatgcacctgataacctgtttccacacaataagccatactaatcattaatcgcccccctcagaaatctctaaaccctctctcaacctgcagacaccgctgatgttactgcctagtttgggaacgggtacgctccaacaacaactggtgacgatctcctgcagtctctgtgatcatccgcatctacccctctgctgacaattgtgtgctgaagatgtttgtttttaatcagcttagatagctcagcgcacagcgctcttggaaactggtgatctgaatatcctactggtactttcatttctttgtgataagattgttctcannnnntgtatcttttaagatacacccccattggggtttttttcc

SEQ ID NO: 5683 - DNA, 402 bp, Zea mays
ggagctgctgttgctacgaccaagaccgcatcaagagctcgccttttatgcgctttctttctccgcccgatcagaggagccgtgcgggtgacgcgatggaacccactttgcgtttgcgacagggaggagaaaggaaaagtgcagcgagagaaggttaaacacacacacacacacacaataaaattaggtcggattcgatcgaatcgaagcccggggatcgggggaaccaaggacacttgttgccgagcggattgattcgagctgagcgggtaaattgacctcaaatttgtgctggaatctggcctcttggagcttggagaccgcaggaggtggccgagatgggatctccggagctggaaaacgggcgtactggagcgagcgaaagatcaaggaatgatccta

SEQ ID NO: 5684 - DNA, 398 bp, Zea mays
cacatccaggtcctcctcgacgacgccagcgtcaccctcggctccggacccggcctcgggcgtatcggcggggcaagctttggggattacttcgtcggcccaggcctcgaacaactcatcgagcagctcgccgagaacgaccccaaccgctatggcacgccgccggctgccaaatcggtcctctcctcgctccccgacgtcctcgtgactcatgccatggtcgcagctgcggagggcgctgagtgcgccgtctgcaaggaggatttctcgcctggagaggtggccaagcagatgccctgcaagcacatctaccacactgactgcattgtgccgtggcttgagcttcacaactcgtgccccatctgccgatttgagctgcctactgacgatcctgatta

SEQ ID NO: 5685 - DNA, 974 bp, Zea mays
cgagtgtttatgtatgcctcgacaaactcggtgcgttctttttttgctaccttgtttatgtcaccaactagcataatgtgctactgcccagtgataatataatcatgacatgccgccagttactactgctcatggtcggcaccatactaaagtagttcttctacatgcatacaccttttttgaggggctcattttgaccattaaccttctttgaggatgtatctggatgaaataaaaaataaattttgtatatttattaagcatgcatcatattactatactgcgaactttagaactttgagctgacaaaaagactttgtactatacaggccaaatttctagcattgttgattgtggttccatgggtgatagattttctagtgcatgactatgttatgatgccctttttagagaggtaattcatctcacccactcagtatcatcccttcttgttagcgaagtgctgagctctgacaagttataagagtatctctttttgctcctgtcatgcaacaatgtatgctaaatgcagaatgtattatatggaacatttcctaataacaggtatgtccagaaggtgccacttgcagctgagctactcgatgtaaggcgcagccaaaagctgcagatggttaaagacctaaatattgaaaaggcaagataccgtcttgaagtagagattggcaaatctcctccactttctgatgaggaggtctggcatgagttgcgggaaaaagcgtgagcaaatgctgaataccatgctttcttgccaagtcattacatttataaatgcaccacctatcagaatcctatttgttctctgccagtatgaacattatgtgttgtccagtaactacagtctgttactctgattgttctcaaggatttccttctcttctttatcaggatagagttgagggatgattggaggctagaaaatcgaaatgctttcgcaaatatatggtccgatactg

SEQ ID NO: 5686 - DNA, 376 bp, Zea mays
gtaggtgcttctcacatccccaacagctaatggtatcaataaggttcagttgacacagtctggaaccattaacaaggagtttttgatccctggatctcctcttgttgatacaagtttccctccaagacttgagatatccgacaatggagcatcgaatattcaagagttaagcatgcttcaagacaaggtcgatggtgatggcacaacagctgatactgcagctagaacccttctttccattttccagcatagttctgaacgcattgctcattgctttggaagcagcaaccagacagcagctcagaacgtgaacgatgagcctcagccttcattggactcgttcgagcaaaccgtgttgaacttagaggagatccaa

SEQ ID NO: 5687 - DNA, 370 bp, Zea mays
gaagcagcggcacgtactctattctggagtaatagtacgtatgtaggtagcactactacgtcatgctcttcgccggtttgcctatatattggcctatacgtactctcgcagcatatctcaatcagaactcagaacacaggtcaagttcaccagaacgcggcgggttctcgatcaggcagcaggagcgcagtcgtagtcgtcgtcgtcatcgtcgccgtcggtctctgccatccttccccgtgcgctgcagcacccatcgcaaggcgcggcgtaaaccgcacccgaggaggaggtaatgctgccgccttggacgaggtagtagctagccgccgccaccgacactactgctggtgccatcctagttagttta

SEQ ID NO: 5688 - DNA, 399 bp, Zea mays
ctgaaaaaagaagcgaattcattgggcaaagccttatatatagttgatacataaggattcgtgtaaaatacatttgcagtccggtacagtttttactttttagccttgtgccctttgcaaaaaggactacaagaatcatgccttttttccggcgtaagctgctgttgacttgttgaatagtttatcctcagggagtttagactaatattaatgtggtactccctctgtcccataatataagacgtaatcaccttttgtccttgtcccataatataagacgtgctctctctaaatacgcgtacatcgatgtagtggtatagagaattaaatacattttttggtctttgaaccagaggtagttacactttatatactgagacggagggagtaatagagttt

SEQ ID NO: 5689 - DNA, 590 bp, Zea mays
tactctaagagagagagttctgttgtttactctctctgctttctgcctcttattgtttgtagagtaaaatttaaaataggagatgtgattagtacgaccgctgaagataaccttattgggcagtaaacaatcccatgaccaaaacaaaacatgaatctatgtgcttttatgcctgtttgttttctatggtttttaacgctgctttatatgtgcttttgtttttgctgtaggtggcgatgatggggtggtagaagagaacagatctactaggctagctgtagcttctcaatgcctgtatgatattttgatccagtcttctgtggaaaaagataaaataacacttgggatctgtatgtgttattagcccctgtggtactctgtttgtttccaggtccgcagagtttagggtttagggtttctgtagatatttgagttaagaggagactaagccatgaagtaaaagagatgcctagtttttttccccttcaatatggtagccagcattgtatcatgtagaattttaatccaggacagaagtggttccatgtatatgggggaaaccaaaccacaccagaagctatcagctatgc

SEQ ID NO: 5690 - DNA, 812 bp, Zea mays
  misc_feature (751)..(751): n is a, c, g, or t
tatattttcttaattcctgatgtcaaaaatatgttaaataatatcatttgattgtttgcttatgtttctttgtagatacaccagtttcatccaaccaataatagcatcaaaattgcacaacgatgtaggtgtctaaaaatagcagctataccttgtgacatttctatataaacctgagtgacttgatttctgcagatcaaagcacacaaagacattgcacattttgaaaccgcatatgttgtcaaactacaccgtatagcgacacttgcacctccacaacaggtgagagatcagacccgccgcgtgtgtttcattggttcagatcatatcacagttttacacattgccatatttcattcgctatttgtgacatgaaatttggtgatcacctttacttgtgtaggtttttactttcacccatccaaatttctcaccaaatgctagcaaccaaaggtacaccaagttgcaatttgaaatgctgccagatatgggttcatgccttgtgcatggtatgcaaccatactctacttgcaatttattattcatattgtttattaccatagataaataagttgtccctcacacgactatcccgcatcaatttggcaggatttgctggctattttgactctgtactttataaagatgttcatcttggaatcgagccaaacacagctacaccaaacatgtttagctggtaacctgcaacctgatctttacaaaagctggaaatagaatctctcaaacctcnacatcaataactgtatcttcatgccgtaacactgtcaggttccccatcttcttcccattga

SEQ ID NO: 5691 - DNA, 372 bp, Zea mays
agtcctcctcgccatcattgcaactagctagctctgcttcttcgtccttagctctcgcacataatctttgaagaacgaacaccaacccaccaacgatcacacactactcaatccatcgactgacatgggcagcctcgacaccacccctaccgccgccttcgcagacgtcgccggcggtggcttcgagccgctcaacgccgacgacgtgcgctcctacctgcacaagtccgtcgacttcatctacgactactacaagaacgtggagtccctgcccgtgctgccgggcgtggagccgggctacctgcgccgcctgctgcagtccgtgccgcccacctcctccgcgcccttcgacattgccctaaaggaggtcaa

SEQ ID NO: 5692 - DNA, 570 bp, Zea mays
cgcgctcccgccgcaccgccgagatcatctggcaggggcgtgggcgtgggcgtggcgacggcctcatcccggaccccgacctccgcgagatcgatctctactgtttccaggtctcaattcctctcctccttttttctctcgtcactgtttagttgtttgtgcagtgctggcagactgctcgtgtgtggcaaactggcaatgcctgcccagttccgtctgcttgttacttcctcgatgcgatgctcgccatgtgctcgtggaaacgccctgtagtaacggtccggtgatcctggtctccagggactcctgaagcgcgaagggagggagaggtacggtcctctgtaccggcagtggcagaagaacgcggccgagttcagcatcgacggccactacccggtgcaggagctgtgggaccgcgcacggagctgctgggagaggattttggcgcaccggggcaagtcagtgctcgtggtcgcgcacaatgcagtgaaccaggcacttgttgccacctctttgggtggggtgcatcctgcatccgagcgtgggatcggagttcattgcgtgtctaag

SEQ ID NO: 5693 - DNA, 384 bp, Zea mays
cgcgagccgccccccacggaggcctcgacgcacgcccacgcggtgttcgttttccggttcgaactcgccagcggcggcgaggagagcgaggcggatttggggaagaatccctcccccagcaaggacgcaaggaggaacacgggcgtttggggaggctacctcgcgcggtgggggcaacgggactggagcgagacgggcagcaacggtgagaggaggaagggcagggggcggaggctggccaaggagagctcgtcgtcgtcggcgtccgtggcatcctccacggcgtcgtgggccagtggctccacggtgatggactgggccagccccgaggaggtcgagatgcagcgcggcgacggcttctcgctgctgatctacgcctggaag

SEQ ID NO: 5694 - DNA, 387 bp, Zea mays
caattccgcctttgggagattctgccgggagaagtatctggttgctgtgccaagtactatggaggtatccttcctgggaactctggaccacagagcatttgtcgaggcgggcggccatccaaggacgcagttttaccagacatttgcgaggatggctagatctgtctgggcattgctcacggttgctcgcctcttgaaaccaagggccgagatgttcttcgtcaagagcggcgttcggttccaaaggaagcacatggaaagcgtaccagctaggctgaccgcggaggaagcaaagatcggtgttgggtttacagtgatgccgggctttaagatcggatgcactatcgtcaggtgcagggtgtacctgtctatgctcaacgcaagaga

SEQ ID NO: 5695 - DNA, 361 bp, Zea mays
ggtaactgcaaccaaacaattcggtacacccatacactgtaccatcacgaaattttataacagtaccaagcaacgaatgtccaataaacataaatctgtacagcagtattcctcatagctgtatgctatataaagctctttactttcgttgatgatgtgcaacattctcgtaccatctcatattgcacagttcatttgccatggaagtacagatcttgcattcatacatctctctgcaaagaacagaataagcacctgtactgaatctcaatttggcaagaaataattttgcttcctccagaatatgcacattttccacaccgagctaccaataaatgcaatacaggttgcaattcggatc

SEQ ID NO: 5696 - DNA, 360 bp, Zea mays
catcatacccacatattacgacatagtgtcctgcaaaggaggaatacaatcacaacactttagtggtaaaggtttgtgtttgcaatgtgttttgtcatatatatatagttgtttatatgtgggaaaaaggaaaacatggagatttgaactccgtatttctaccagacaagaaaaacaagacgtggcatgtgaactgtactgtacacatgttcattagttatttagctatcattgcaaaaataaataaaataaacaaagcaaaactatgctagcttcttttgctgcaaaaatgtgtattatccagaattaaactactgaagccacttgctggtcatcaataattctgcagtgctacaatac

SEQ ID NO: 5697 - DNA, 172 bp, Zea mays
gatgaagccctgcaatatgctgaagatgatgaagctgcagatgatttggaggaactcccaagcccagatctccttactcaagccgacatattgaaaaaatattttggaattgagtatgatagcgaccagtcaaggggttgttgatgtttagtcctaaacaacacgatatgag

SEQ ID NO: 5698 - DNA, 813 bp, Zea mays
ggacatcatatcctttagagatattttataccatttatactatttgcatccataagcatagtgaacacctgaataacacccaaacacaaggaaccacatacaaaagcaggttagtaaagcattacttgcagtttatggatattatgcccaacaaggacacaactcaggtgcatattattagttagatgatgcatgtgcgcctaaccgcacaggcacaacctcttcagtacgaaattttggatggacagattatttatctaatactaacttgcagaatataaactgacgaattcacaaaaaaaagacaccttcatttagttacacatttggttattgtgtccttcagagcccaacaatcgaccgggaaatgcataggaaggagtgaacaacaatccttgttgctgatgacaaataccaacctctattctaaatggccaactcttagaatggtgccacacagattttgtaaagaacaacaatattccttcgccattaaaaaacaagagctttgaggactagctaaaaagcattttggattggagagaaggacctaccccgtcgtggtgttgggggagttcaagaacgtggcaaagaccactttgggccagacgttgaggcggagctacagtggaggcggagctcagcctaggcggaataggggcggggtggatcggagcgcggcaccagcgaatggggcgacgaccggatgtgggcgcttctaggcggagtagcatggccaggcgaagtctccagcgcatccgccaccactgctttagcaccacctccttgccgaaccccaccacacggagctcc

SEQ ID NO: 5699 - DNA, 347 bp, Zea mays
acaaacatagttgtactttacttgatctcgatgacattggactgcaaatatatgcacaacaattgcctcatgcacacacacataatggggccgcgagttgtagctcaaccatcgtctctggtttctttctaggtggagatggttaaaattgctggtcacttataattaccagcatcttatacgtcattgttgttcatcgccaacttattcaagtttgaaagtagaacactgagaagatggctgagaaagagaatattctaatgcagagatatgagatgggaaagttacttggaaaagggagttttgccaaagtttaccatgctcgcaatattaagacttcagaaagc

SEQ ID NO: 5700 - DNA, 748 bp, Zea mays
ccacccttctcagaacaactcaaatatgttaaagaaaaaactgaaatgtctgaaagaattttatatttgggcaattagtcttcatagctgaaaacaaagacttcaacgaaaggcaaaggccaatgtattcatactgcttctgaaggataatcatttggtgtatagccagctctaaaatacaccacagcaactttctggccacctctgcatttttaaaaaaaatgaacattaataagcatactgaaacactaagattctgcttaaatgctaaccataaacccagcacactgaaaggttaatatgatgctcaaatgctaagcataaatcagtaatcaatgaggattcatacacaagaagagttccatctgggagaacctggccttccgcttccacctgcgataaggttttccttatagttgttatgccatgtgtaataaattgtcaagggaacacaaatttgatcttatgacttctcatattgcacatgaacaaatagttaacaaacacttaaaactgatcccaaaataatgacaagactcaactcaaggatgggaaactaaaaaaaggtatatgagttacatgggttaaaaggacaactgattaactgattaaattatagatttgatcattatgaaaaacatgaaggcaaaacatagaaggatatgagtcttgcaaatgtttggaaagccagtattgatcatacatatttctctcttctggctgaacaaatcatcaaaaaaaaaaaaaa

SEQ ID NO: 5701 - DNA, 759 bp, Zea mays
accgctgtgccgccggcggcgaggaagggacgcaggaggcgctgcgtgagcgagcagcacaagtggaagcccaagggagctgtggacgaggacctgtacaagatctccccgcagcttctctgcaaggtgaagaaggcaagtgccctgtaatcaaatcctccctagctagtttgctctcagatcagtgcgtctctcgctgcatgcacccaacgtgtagctaagtggggttttaccttttgtctagttctcgtcatgtgactgtcctttatctagcctaagctgacccctttgcaagtagcttttgtttggatagcattagatagaacatctacatttgccaaagatgtgacctttttttcaaaaagaaagaagcttaagcgcttcatttttttcacagcatttggacggccttttgtcaaaggccatgagcgataaagctggactgtaaattcaagcgagattttaggcgaggattttattctcatgacctgttcttcgttctgcagaagaagctgctgaggaatttgcttggagggtgcctcggcttgggctgcatcgcctgatagtgagagatgcagagcttaataagtttcttgaaagttcgcttgcttggttttggtgctctggagagagttgtatagttgtctacgctaatatgagattaatggaaacttactactgcttctgcactcgtttgaatgtaacactagcttgcattccatctttcctacggttgcttcagtgcctaactaagggctg

SEQ ID NO: 5702 - DNA, 1108 bp, Zea mays
  misc_feature (1103)..(1103): n is a, c, g, or t
gcatggatgaacaagagacggagggagacagatgcaaacatcgagactgggtaggtgtggcgtcgtgctgatcttcctcccaccttacttgaccatggaacctttagagctaaaaggcaccaggcactgattatattaggttacttgttaattaacaattagcatcgcgattagactagaccagttggttactaacaatcaaacaattggtatcgagatgtcaaaggcagtcacctttagtgggatcgatactgttcttttagtctattcaattcagtagcagtctaatcagaagacgccacttgtttccctcgcttcaacggcgctgtcacgggttcagacgtgtttctatttttcttcttttccagccttacttttgattaaactaattatttgtttctggtcttcgttacgtgtactttctcgctcctacaatttttttcgcgtgtgccatatgtgttcccggaaaagtttcctgtccctttcgggtactccggatggttcccattttttttctttcataaaagttctattttgaagcttggagaacagtgatgtacatgtactgtgagctatttgatttgattgaaggaaaaaaaaatgttgctgcagtctcctcgatcttcagagctgtgatgtgatttgtccagatacctacaaaaacgtaccaaatcctatctttttgtcctacccattgtttggttcccatgcttccagaatttatatggactgtggattttaatggaagaaaagaaaggaaaaatatgaatcataaactactgactcatgtcataacattgactttttgtgtagggttgttatctgtctttgtagcagaagaaacagtcctaaaaaagaatggagagctcctcagataggagcaacgtttctcaggggaaccacctgggttatgcgagaagcacatccatggattccactggtcctcagttagctggtaggtctagctcaatgttgagtaggagaagtagcagacagggctcaaggggatccatcagcctctcaagggagatgggggactccataatgagctcaatgaggcattctcttcagtcggcggatcaattgctaggagacatcgatanctcag

SEQ ID NO: 5703 - DNA, 487 bp, Zea mays
acatttgtaaagggtcaaaaacaccataaactcttgctttaatctgccagctatagtatcttacaaaaggagaaaaggaagtatcttctacattctagacagagaagcggtggggatggtggtgcgttgcctataacatcagggaaacaacaaaagatacagcttagaactcctcgtctcaacctcagcaaagaaaacaaaaaattcctcaaaataagccgcgcgaagcgttagggagtagaccaccaagatccaattgacacctaaattgtctgggataagttagcaataaaaatatattcatggcaatcagccataaggaaattaacaagatagtaaccaggacaataaactatttccgcatgaaactacagaatcccacacagcaacacagagtttatatagatccgaaccttaagtagcttctgaagaactgcatgaaaaactactcatgtggtgaatgtttgccctcaaagtatgatctcaa

SEQ ID NO: 5704 - DNA, 409 bp, Zea mays
ggcgtcatcgttgaccgggtggaggagatctcggacgccgtggccggttttggtctggggaaaccaggcctcggccggggccggggcggtgctggcgtggacggagcgaaaacgcatcaggctcaggccttctcgcagcagcagctggggttcctgctccggcttatccctgaactgattgagcagcggcacagaaaggacggtacaccaccatatgtaacatcccagtttttgacccccctcgaagcggatggcaagaattcgtctttggggtcaacacttctcctgactgactgactgactgactggcaggtccgatttgacagcttaggaggtatacttgtgctgcgtgcacacactcttctgtatagtctgaaaactcgcggttccttgttggttcagtacaggt

SEQ ID NO: 5705 - DNA, 866 bp, Zea mays
cttttcatcatctgctctgcttgttcagtgcttggtaacttttatagcctatttgatgagtcccaatgaccattaaagtaattaggttcgttaatcgttagaatcatgaaatgtcatagtaagccttttttatgtatctcttttcaggaaatgcactgtgtaccactgatcagcacattattttagaactatttacaacaaattatacaacttttgaacttatttttattgagatgttattagaccttatatataacatgcttttcattatattatatatgtttgaatactgaatttcatggtatttttttttaacttgtataccatattgtgtatttacttaattgcatattatagaaattggctaggactatcctggccccccactggccatggcgtgtgctgcttacagcatcagaagccctctcaagctcgctgtaaggcacggctcggatgtgttgagtagcaacaacttgtgcaatggctttaagtcttcggtgtcttacctcaattctcaacgttggagcagcaactgctcagccgtcacaatgcggcatgtcgcatcccattgtcactcgattgttaagactccagcaatgtggccctcaaaagcttcagcaactgatgcagccacagcttccggtatataagatactggattattttgatttgtcatcttaaactctgtagtcgaaaatgaaacattgtaatgtaaattcaagagcaagttggcttgatacccgttcattgttttttctcagatgagaggataactgtactggtcattggtggtggaggcagggagcatgctctttgttatgccttgaaccattccccatcatgtgctgcagttctatgtgcccctg

SEQ ID NO: 5706 - DNA, 372 bp, Zea mays
gggtgttcaagcgatagtaagcaggctgctttctggttacttccatgatgaggacatatcgattattgccgaagaagatgatgggacactagctagtggcgatggtgcaactttgcttcaatatgttgttgaggctatcaacggctgcctggttgacgctccaaactatgggcggagattccctgagaaaaagctcggtgctcatgatgttattccagccatacggaaatgcagctctactggaggcctgaaaggaagattttaggtgcttgatcctgtcattgacacccttgggttcgtgataggggaccaatatgctattgctctagccttgattgaagatagagaagttatgcttggtgttcttgagtg

SEQ ID NO: 5707 - DNA, 594 bp, Zea mays
agtttgctgacattgggaacacagtaactatgcaatctgaagggtgagaaaaaggagctataactatttaattttattttccttcttatacatacatttgtgtgacatagttggcattttctttacttcggttcagaggtatattccgcatcttagactgggcggatattattaatgcgcatatagttcctggacctgggattgtagatggcttgaagctcaaggtatttcatgacatatatgcataggtcttacacaattactgagttaaagataatagttaatgttgcagctgctaatagctcatgcattgcgttgctcacagtaactgttgtcttctggcattgaagggtttgcctaaaggaaggggcctacttttgcttgctgaaatgagctcagctggcaaccttgcttatggagactacactgctgcggctgtaaagattgccgagcaacatcctgactttgtaataggatttatatcagtgaatcctgcatcttggtcaccagcaccgtcaagcccagcatttatccatgccactcctggggttcagatagctgctggaggagatgcccttgggcaacaatataaca

SEQ ID NO: 5708 - DNA, 382 bp, Zea mays
  misc_feature (374)..(375): n is a, c, g, or t
cataggagaaaatgaactggcagtgtataaggtaaaatgccctatctgaagtagtgatatttatatatctggggaccgctctggatgtgacgcattaagggtaccttgtccctttcttgagatcaccagaatccgcctggagtcttgtgctcggtggctgatctcagggctttgtgatgttattacagtaatgtacacggtgtaacagagtttcttcatactgggagaatggttgtttgggtcttcaaacggttgtgttgttgtagaacgtggtggggggcgtaacgtcacgggctgtttagttctgtgcctgagctagccttctgatctactgtggactcactaataagcttcatgtgaaatgtgtagcactnntacgcaa

SEQ ID NO: 5709 - DNA, 267 bp, Zea mays
ctttatgacgtggagaccaattttgcaggtgagaagaaagagtgcaaggtctgcttgagacgtgaaggacccggaggagagtcttgttcgctttcgatgtttttagttggagtcgaatatacagttgtttttggttgcgactttgctagatctctctctatatactgcgactgatatatcccgtgtacttttgaagtgatgcgtatattgacatctggaataacaatgcctttcagtttcattatctcaataatggcccttcctgtg

SEQ ID NO: 5710 - DNA, 369 bp, Zea mays
agggtggagtataccatgagttgtcatggcaaccaatgagtgacctgaacatccaagcagattctgcatcaacctaaaaactcagcaggaactactttaggtttgttcatttcaaattccttggaaccacttggcttggtctggagtgcagataattgattgactcctgtttcttgcttatgctaaaagccatgcgagaattagttcagtatcaactcctatatatggctcaagcatagaatgatttcacgatctggttactccaaacatccaaggacacaacttctcaccatgtttcatgtgcagaacttcccctgttaagcttagttgaagaagtatgttgaagtcagaacttccctcacgtcaaag

SEQ ID NO: 5711 - DNA, 361 bp, Zea mays
  misc_feature (351)..(355): n is a, c, g, or t
ccaacgtcgcagccatttatctcgtcgacgtccctgatgcagccattgacaacgattccagcccacccattgttctgcatcagctgggcaaggttgccacccaaaactgcacaacgcatgctcccgccggcatcaaccaccaggaccctgccgtgacctttctcctcaaggaactcgcggagcagaacgttatcctcaaagatcttcagtgtcacaacagggccagcaaaaatctgccggcctccatagattcggaagataggttggagagaacgaagatcaccattcataattaaagcagcattagcatcacatgcttctgcggtggccaatggcaaggcagccatcttnnnnnttcagt

SEQ ID NO: 5712 - DNA, 385 bp, Zea mays
tatatcactgaaatccattttcatccataacagttaagaactagacatgaattgcagcagtatgtatagcaccaaaatacatgtgacactggcagggaaacagatagtgcacagcatgattgctacatggattcggttcagaggaatatatgcagtgacacagggggtttggtttcgtcccttaaacaagatacaactgaatggtcggcgttttcatcaggtctaaaagcatctctcaggaaaccactgaccctggtacagtatatatagattgtttaaccacatgtatatcctgctataagattgatgtgcagcagaacaggacgtattgggagattgcagaatttggatctttatacttgtgcgttgtatttaatctgttccc

SEQ ID NO: 5713 - DNA, 490 bp, Zea mays
ttctcagttgctcgccgtggtcggctgctgctccctaatcgcctcagccgcgacctcaccgtcattcttcagctcgctgcgcgccctgctccactgtgtcgatctgcccatctccttgagtccgtgcgcgcgcagcttcctcaagtcgtcgtgtgcccagcttgctccagctcgccggtcgagcttctcccttgcgctcggattcggccgttaatgcccagtcatatgttctttttcctagctcggatctcgtcatccgccgttctctaacccgtgtgtcggtcggcgtcgtggagttttggtttgattgactcgtctttgacctcgccggtgtcgtcgaaccgtcgaaccccgaatcctgaatgttatgcagaaataagcgaggtccctgtgcatcgcttatcaagtgctcggtcgaagacttcaatcgaaggtcgtcgtcgttcgtgcatccccaagaaatcccaagaatcgggtgaagacgaagtta

SEQ ID NO: 5714 - DNA, 367 bp, Zea mays
gctgctcactgatgtgatcagcaattccgcatggaatggccctgttccaagtaaaccatctcaaggagctcaatgtcaccgctgatcaccgacagacatcgccatggttgaagcgccgtgaatcaatcaacaatcagtatgcttggggatgagtcctagctagaaccctgtccctttcctgctccttccccccctttctctagcttattttcgccttgcttttaaaaaaaaaggaacttccttgaatgcgaagttaggtatagtaattatgaggtttccataagggaggggaggagagaggagacgatagggacttcgtacggggtcgttcgcttgtgggttcttcttccctcctggcttcattagg

SEQ ID NO: 5715 - DNA, 396 bp, Zea mays
gatggtttaaagaaatcaggaaggctacatttccttacacagaaaggagctccatcagtttgtattatttcggtaggaagagatcaggaaactagtacaggggcaacatggctggcacattatgcagaagccgccaacagctccctttcagctcgctcgcggatcctccgctccaactctggcctgaagtgcctgataagcccctgcacaggccatgccgcagcatccccaagcgcacagatagtatgcccttcgatttgcttcgtgacctcatgaagcatgtcaatttcctccagcttcgcgtcaccaaccttgagcctctccatgatcatccagagccagggtgtgccctctcggcaaggcgtgcactgcccacaactctcatgcttgtagaag

SEQ ID NO: 5716 - DNA, 435 bp, Zea mays
ttgccattaattgcacctattatgcatttctatatatgtcactcaatttagtgttccagctatgtctaattcgtccaatgcctcagaaacatctactgatgctgattcactttgggtgttgtctaattcgtccaatgcctcagaaacatctactgatgctgattcactttgggtgttgtctaattcgtccaatgcctcagaaacatctactgatgctgattcactttgggtgtgtccatgtgtgtcctttagcttatccagagcatccttcgcagcacggttctgagctatctccttctttggaccataaatagcacttccaactacctcaccatcaataaccacctgaaccttcaaactcttatcccattcgtctttcagaaatttcacccctcggtgagtcttttggcaaaactcaaaaagctcgcttacagg

SEQ ID NO: 5717 - DNA, 397 bp, Zea mays
  misc_feature (391)..(391): n is a, c, g, or t
ggggcaatggtggcctatggctctggtaagttttgagtggatgaacgctaatgcagcagaagattggaaacattaactggctatttcttgtgtggccacataatcaggacttctaatcacatatgttgcgctgaacctgatggatgggcatggacaacctgcccttttgtacatcgtgcccttcactcttggtaatgatgtgtgttttgagactcgtctcgtccgtacactgcctgatgtgtgctttgttttgttggtacaggcaccttgatcgcgcttggatggaagagaggggagctgcagaacctgtgggcgaggggagagccagagagagtgtgcacgcatatgcatatgccgctgctgccgacgaccccaaactaaccacaggggncagtag

SEQ ID NO: 5718 - DNA, 395 bp, Zea mays
tgcggattgcagttgatctgagaagcttcagggtgatggttgatgcctactgtgctgctgggagatttgaagatgcagttgcaatgttcagaagaatgggggaatggaagctggtgcctgatgtggcatcctataataatttgattcggcacctgcagattaaccagctgatagataaggcggaggtgctctacaatgagatgtgtgagagtggtgttggtgcggataaggagacatatttactgctcatggaagcatgcttcagtgttgatcgcatcgatgatggtatctcttactttgacaaaatggacgaattggagctgaagcctgatgcaactgcatatcataaacttattgatggcctggtgggtttcagtatggtcgacaaggctcag

SEQ ID NO: 5719 - DNA, 367 bp, Zea mays
tgctattgcaatactccactcagtctcagtggaaacaaagaatgcaggacagagtagtgcgcttattgttcctacaacaagagggccagcaaaatcaagatgtgcttcaggattaggttctattgctggattgcagccaattaattttattaccttagcaaccccacaccttggggttagagggagaaatcaggtgcatcaccaaaatgtttcggattacgtttgcaaaatatactgcacattatccagcaaaggctcgattcctgggaaaacgaactctctatttgttattttgttcattcatgtcgattttgaagttgcatggtatgatttttacaagcttggattatatcattgctgaagtggt

SEQ ID NO: 5720 - DNA, 371 bp, Zea mays
ttcatctactgacagttaaggctcttgtgtatgtcttaataaagacaccctttccggtcactccgaggctgcaggctgctctttctccgcctccgaggggccattggcggtggtttcttggctctcagcaggctgcttggcgccgtttgctggggctgccgcgccgccttctttggcgccgtcctttccaccacctttggcgctgccatcctttgtgccctctttagcagcaggtgctggtggtggaggctgcaacatatgtggcggcggagcatgcttcagcttcaccaagatatggcgcatccgggagaggtcggtgggcttgccaggcttggggccctggacaactgtgatggatggcttcttgtcct

SEQ ID NO: 5721 - DNA, 362 bp, Zea mays
ttctattacttgtcttacaaacacctccaccttttcttatctatttgactgtttgtaattattcactatttaataaagtaattaaataggcagtttttaacttaaagcatacagatttacccagaaaaagtttaggtaaaaaaaggtgaacagtaaaagagaattagtcatcataaagaagttacatttacccctgttggcatttggattgcagttcattttctatttcttaaattggacaacaggagatcatgtatctataacaaaatataaagagccattagtttaatgtccaatgtaacctagagggggaagttgttgttgtcttttgaattgagtcgggatcagaacttcagaaatct

SEQ ID NO: 5722 - DNA, 974 bp, Zea mays
  misc_feature (963)..(963): n is a, c, g, or t
  misc_feature (970)..(971): n is a, c, g, or t
agtatctgaggacagagtgactcatgcagcaacggcatttctcttggtggcgatatacgggttggtctcgagcagattctccagggatttcgcctttctgcttcgcacccggccagcctccttcaatagctccccaagcctccgcttctcgtcgtcaacgtctgggtttgccgtacctagcttctcctcgcgcattccaaccacatattccaagatctcgatggcctcatccagcctggtaaacaaaatgcaaatatcaacagataatttgtggctaaaatgaaacacaaacttttaattttgaatagcaagctcccaaacaagtactaaagcagtaactcaggaagaagtaccgctgcttcagcgatctgatctagccagctaaggtagtgttgacatttttgatccagccagttgtactctttcacccagactataaagctaaaagtccacatgccttacaaagcaggatgaagtttccacgagaacagggagcaagaaaacaaacataaaaaagacaaagcaaaaggataaagtatgcggaacccttcttttacagagcagccagcgacaagcaagtaaagatgatgcaggatggtcctacttcaattaaattgatccaactttatactggtaccggtatctgatcaactaattggagtagcaagaagctggtgatagatgctaatcatgagcctagctgtaagaggagtagactaagaacaaagaatccccacttgccatagtacctttaccctacatgccacctactgtttccagcaaatcactgattggaatgcaaatcattatgcatgcagccacacagacagtcatcagcacctagttgagacaatgaattgggttcgagaagtagggtgggagtttaccttcccatcgcgtcataagttccagcaagattactgtagactcctaaagtatccggatggtatggcccgtattctngtccagnngac

SEQ ID NO: 5723 - DNA, 771 bp, Zea mays
  misc_feature (705)..(705): n is a, c, g, or t
  misc_feature (707)..(707): n is a, c, g, or t
agtactactgcactgtcattgatgcccctggacatcgcgacttcatcaagaacatgatcacgggtacctcccaggctgactgtgctgtcctgatcattgactccaccactggtggttttgaggccggtatctctaaggatggccagacccgtgagcatgctctccttgctttcacccttggggtcaagcagatgatttgctgctgcaacaaggtatgctatcaggaataactgtttcactcttcattaattaagactctagcatattagtatgtgagacgtatatagagtttgatgctaatataataggttttgagttgtataaagagtttgccaagtaaaatagtcgctagagctttcattaaccttctgtttcttccatttttagtagctaattaactttataaccttcattactttgctactctggtctgtatctgaaagattttatctatttttcatataagtctcacattcaattgttctggtccaagcttataccatgctctttctctagagaatcaagttaatgttaatcagtgttttaaaggtgtcgcctatgtgtcgccatgcccgccttactcgcctaggtgccgcctaggcgtccaggcggcggtccaacgccttgtctcaccttaccgctttaagaaccatgatgttaatgttattttacgttggtgttgtatttttagatggatgcgaccantnccaagtattccaaggcccgttacgatgagattgtgaaaggagtttcatcctacctcaagaaggt

SEQ ID NO: 5724 - DNA, 971 bp, Zea mays
  misc_feature (909)..(911): n is a, c, g, or t
  misc_feature (913)..(914): n is a, c, g, or t
  misc_feature (965)..(967): n is a, c, g, or t
gcactggcaacccagctggcattgctacaggtgcgaacgcttcttctctgatggcgttgtcatgtaaacttccattttttgatcttgctcacatgagataggcattctgtagttaatgttaatttcttattgctatagttagttaatcgttcctctttcctatctgctaacacgagcagagagacacggctgggctgactgttgagaacggcgacctgaagatacgtctggagagcacagagcagcagatccacctacaagacggtaagcaaagctaaaaaatcacactagtttcctcacccatcctgccaaatcgcccgatttttttttccaatttgacctttttttagaaaaaaaatcgtgtttgtctttggactttggacgaagtactccagtttttagaccctcttgctcggcttcataaaatatgacatcgaggtaaaactgtttgacgccagagaccatggcgccgagaactcggctacgccagcgaagtccttaggctccagcgagaatgagaccttgcgtcatggcatgtgtcgctaaacatgtgtcgctgaccagtgttatctcggcgtcaaaaaaaagtaaaaaaacgctattaagttcttcagtggttaagcgtgattttttttcgaaaaaaactaaaattcaaaaaaggccaaatcgcagcaaaacttggattttgttctgggcaaacaagtgagcgaacagccaaaccgcaatcctgttgcagcactgaacggggccctgaaatcggagatgcagcggctgaagatggcgacagggcaggcgggcaaccagatgatgaacttcgccgaaccgccgcacacgttcggcggtgcgaaccagcaggtcttccaccacccgggccaagcagtgccgccattcgtggtggcgatgcaacannngnngcagttgctgctgccgcacatgaaccagccgttgcaccctctgcagagccnnncagc

SEQ ID NO: 5725 - DNA, 932 bp, Zea mays
gtatcctataaaggaagcgagattgtgctgaactgctgatcattagtaaaaatggaagcgatgtgtttatttatgttctttattttggattttgaggttggaggggagggtgtgtgtgaacgcaagcatgtgatgttatatattcttttggtggaattcctgaactgacgtttttttattactgctgtccagattcagggaatataagtaaaatgaggccagttttttgtgggaaccttgactatgatgttcgcatctcagaggttgagcgcctttttgggaagtatggaagggtggaacgagtggatctaaagacaggttagtctgttactctgttcattgttatgtcctcgaatttaattgtgatctataatagcaaaacaattgttgctcctgcagctatatgtagtttttggtcaaaggcagtcctctatttcattaagtgaattacatccagtgtcagcaactgcagctttgaatcattttctctctccaatttagatactgaagcattactgaatgtatatatatccatccataagacaatgctgctggatttgcattttttttacaaaattttcaattatttagccatccaaaaacatagcaatgcctttgtttaaattttgttttttatcaattgatctgcaatatttgttaaatcacaaatacacgattttcacatgactcctctaagaatgtgatctttgtacggaaactgctatcaccatgatgtggcagagattgtctatcttcacccatgcctggtgcaaagaagctgcaaaaggaccaagttgttacttcatccgttgtgaagccagaggagtttcagcaaaatcagattatgtttatgttttactgttataagtcattggacaagtgtatatcaggataaattagaagaaaaaagttctttcttcaaatttaggtcc

SEQ ID NO: 5726 - DNA, 993 bp, Zea mays
  misc_feature (288)..(290): n is a, c, g, or t
  misc_feature (988)..(988): n is a, c, g, or t
catctcctcctttctcaagcacttgcagccacacatcaaaccctagccgcccccccatctcctcctcccatggtgccattcgttgccgctcggatctccgtcgcgtggtgcaaatcttcaacggttttcggtggagggaggaagggaggaagaaaagggggagaacccaaggtggtggacttccggatcgtacttagggatttgcccgaacttccggtaaaggcaagtaaatacagtggtggttgctaccgtttggtttgcatcctattccctgttattctccatctnnntcctttctcaagcacttgcagccacacatcaaaccctagccgccccccccccatctcctcctcccatggtgccattcgttgccgctcggatctccgtcgcgtggtgcaaatcttcaacggttttcggtggagagaggaagggaggaagaaaagggggagaacccaaggtggtggacttccggatcgtacttagggatttgcccgaacttccggtaaaggcaagtaaatacagtggtggttgctaccgtttggtttgcatcctattccctgttattgagtatgcataagttttaattatgttaatcattgaattctatgatgaagtttatttgtttggaagtattaattctcaattgtctaatattgtggatgatcataatttggtaatgatatatgtggttgattcccatcttggatgaagttgaagtatctttttgaatcatgttatatgaagtgttgtaggcatgacatgcgcatcgcatcatccatcttgcattttgaagttatgtcatgatcttatggtccgaccgtaccggtacatttttagcatcgtacgttgcccgaggaggggtacgatgcggcttcatatccttagtggtatgaaggcagaagtcatccttgcatttgcagacatttgcactcatgaggaatatatgaagtgtgacattactatgttactattgtggtttctacctgtnggggg

SEQ ID NO: 5727 - DNA, 412 bp, Zea mays
ctttcacagcaacgaacatcctggttcttggagatgttcggtggatcaaattcgagtagtagtttgtttgatgcagtggcagattaatgtctctacaggccaattagaatgcacatacagaacagaaccgtccaaagaaagcctgtagagtgaaggctagtactctcttattcttaacagtgtttaacgcagatacatacatacaggcagctagctagatgctagggtttgattggtaaccctgcactccggtctcaagacggaggagggcaacgagggagtgccgtccgccgtcgtgctcgtgtcgtgttgcttggttcgtggctttgtgtgcagtgtgcatatatagaacatgacgtcaccgcgacgtaagcgtgtgctcacatgagaagtcctaccactaccgaccatg

SEQ ID NO: 5728 - DNA, 395 bp, Zea mays
ttcttgtggtggcaagatcgttgtgggttccagaagaaccctcaaatgcggatgacataagaggtgcttgcatcgaggagtgcaccaaagaaaataaggctcctggcgacaagaagacatgcgaagtgttgtgcaccaagctcacaaaaaagcctagcgaagaaggcaaacatgattgatgaagtagcactccgataatatataccctagtggatcagtggtcatctttgtagccatgtctgccacacgatggccttgattatattgtcttattgttttgtttttggtttccactagtatcctaattccttgttcatgtaacctaatgtcactcaaagcattttatatgcttcacttaattaaataaatacaaaggcaaaggcatgttctgtagt

SEQ ID NO: 5729 - DNA, 488 bp, Zea mays
aggcagacacaagcacgcgacgtgctccgctccccagtccccagtccccacacacggcaagctacgcaggctcgtgctcgtcccgcgcccccgcgaaagaactgatgagctgcccgggccaggccggcgggtggctgctcgactacggcctggtgggggaggagatccagggctcggagttcatctacatggtcgacgacccggccgtctccaggtgagggagctgcctctttctcctgccttttttttatgctggcattgactattgcctattggtggctaactgttgatcgattggttgtttggttcggtttgcgcttgcagcgtgaatgcgtgatactggggttcgatgctcccaggaaggagtccggcgccaacaagaggcaatacttcccttcttccttcatttgggctgaattctgcctgcataggagcctgcggagagacatacataatcatgaacggcttgggataatttcttgtttgtc

SEQ ID NO: 5730 - DNA, 390 bp, Zea mays
ggggttccaggtttagtctgttactcctagcctctcaagttaagcagtctactattagtcttgtactgttcttcccgtgccatttgagaaagtaggctattgttggcctcttaaagtgggtaagtattagtgacaaactttgaaggtagagatcgacatagttgttgctatttctgcgttgagctacacatagtcacgcaatgtcataaatgcttgtttctatttgagttcaaggtttgtggttgagagagtattgcatggggggatggccgcatgggactttggtggtatgcatgcatttatctaaatagaaaactgggttgaaccagaacaaagggtaatgtattaaataagcacattggcatgcaatcataagttcatcacctatgt

SEQ ID NO: 5731 - DNA, 753 bp, Zea mays
aagggtggatcacttcagtttctcatcgcttgctctggtaatggcagtccataacgatgtttctttctctgatcatgacagtttatgtttctgcttgtgtaatgtgtatagaatttgtcttatccgtttgcttagtagagataaaatcataaaatggtgatcaactggaattttatctggtcgagaatttgcagtactgtgatgattcatgagatcgccacacagtcttgtgaatgctatgcaagaaacttccacaatttgtcaatgatatcatttgttcttgttgctgaaaattcgtccattttacttattgactgttagcattaagttagcaactataagtttcatccttcccgggatcagaattcagactctgactactcgagtgcccttacttaccatgccatgtctctggttctgcagtttttcctggcactctcatgcttcatcgccattggtgttaatctgagccaattcatctgtattgggcgcttctctgctgtatccttccaagtcttaggccacatgaagaccgtacttgttctgtcccttgggttcctactctttggcaaggagggcctgaatcttcaggtagtccttgggatggttctggccgttcttggaatgatatggtacgggaacgcatctgccaaaccaggcggcaaagagcggcgcagcgtcctaccgctgaggtctgcaagtctcaagggaagttcggaagaaaagggcggtgccgagaaatagtcttgctct

SEQ ID NO: 5732 - DNA, 390 bp, Zea mays
agatgctgcatccgaggccgcagcgaggagtgcccggcttgccgctgcaaagaagaaagagaagagccactacaaccagcagcctgtgcggtgaactcccctgatctgaggccgcagcgaggagtgcccggcttgccgctgcaaagaagaaagagaagagccactacaaccagcagcctgtgcggtgaactcccctgatctggtgtctctagaaaccttttgagctctgatgtcccctgttcgttttggacctgcaataaaacttttgagactgttttttgacatggtggaggtgccgtctgatgctcgttttgggaattaaattacatataggtacataggggttgtcttgtcgctggattctgtttggtgtaatgagctatgaactgt

SEQ ID NO: 5733 - DNA, 371 bp, Zea mays
tgactgcttcgcgtgacgggaatgacggcccagagaaaagacggccacctctcggtctacctgagcccctcaggacccgtgccccgctacagacaggactgcagccactggtgtcttcctggagtccccgatgcctggaacgagcttctctacgccctcgtcatgaggaggcataagaagatggccggcactaggacaccggacgctgaagagggagatgtcttcagcagtggatcatcatcgtgacaaaacgagcttcgtagccatccatccatcctggctaggcgatgacagctgctgtttcacataggatgccggaatggcgagacacgtttatggaccatgggtgctgtttgcaagaagctgagcta

SEQ ID NO: 5734 - DNA, 395 bp, Zea mays
tgctagcacttccttaaccatcttggagagaagccatcactttactatgtcagatctggatcatcatcatcgcgaactgcaagtgtcccaagatgaggtcctgcggcttagacagttggtgtcaagcaaggactccatcgtcaaagatctgcatgcctccaagaaatcagtcgcccaggagctagaggccgctcgactggctaccaaagttgcagaggacaactgtgccattctgaaagctcagcgcgacaaggctatggataaagccgttcttgcggggcggatcttgatgagaaggcatggtgtagttgttcctgatgacattgttgccgacgtcaaggctgcgcctgatgcctcgagtcgcccttcttcttccattgcctctgagaaagaca

SEQ ID NO: 5735 - DNA, 382 bp, Zea mays
ctcgcatcaacggcctcgacggcgtcggcgagggcaacaacctctaccccggcggccagtacttcgacccgctgggcctcgccgacgaccccgtcaccttcgccgagctcaaggtcaaggagatcaagaacggccgcctcgccatgttctccatgttcggcttcttcgtccaggccatcgtcaccggcaaggggcccctcgagaacctgctcgaccacctcgacgaccccgtcgccaacaacgcctgggtctacgccaccaagttcgcaccagggtcttaagctagctaccgggccgcggcgtgccaggacattgtgttgtacactactcgtttctgtcgtgatctgtaccatgaacgaatgcaaatattcttgtgctctcc

SEQ ID NO: 5736 - DNA, 435 bp, Zea mays
acatgaaactaaatctttgtaccaccctacaactcaataacaatcttgtgaaccctctccttgggcatcgcatccagctgcagaatcagcagccctgaggaagaatcatacttgagctcaatctgagctgaaccgagcgtggacttccttggcctgaccgaagagtaggcaccgaaccttccacagcccttcacctccatgcacgccaatgcgacagcctcggagcccaaggtggaaccgtcgccgccgaggaggtgataggtcaggccttccaccgccccgccgctattgaacatgtccaccagcccgatcggggcgaacctgaaaccaggcgccaactcctgcagggaacataagcacgtacagtttcgcagcatttgttgctaaactaaacgggcaccgagtgactgaccttgatgggtgacacggtgagga

SEQ ID NO: 5737 - DNA, 391 bp, Zea mays
ctgggtttcattccatttggcagagaaagaccctgctgatgttcttgacccaaaagtaagcaatgatgcatcggatcacaatcacatgatgaaggcgttgcatattgctattctttgtaccactcagcttccatctgaacgaccgacgatgagagagatcgtgaaaatgctcaccgacattgatcctagctccacagctaggagggcaaagaacaagactgataagtaacagcgacaggctttgtcttagtaagatatactagtaataaccataatgtcagggcctcttggcaccctgtagcaatcatgggggaagcttattaggccgtcagaatggctgattagttaatagaaactagagggctggtaaaataatatggaggtatagcct

SEQ ID NO: 5738 - DNA, 319 bp, Zea mays
caggaacgcgtgtacacatggagaacaagggggaatctgattcccaggttggagaggcgaaatcaacttttgttttagctaaaaaccgattgattgcaaagtctggtggcaaaatagcctgcatagtattgactacacaggctacgcggtctcaccaaatctgaaaaatgatgattgaacctttgactctacaaaaaaaaatgcagaacaatctcaaatcctatcaaccaatcacctactgtatctttgaaccctatgtatgtttcgctatcaacccccgttgctatgttcccaacttattacaatttcattcaagcga

SEQ ID NO: 5739 - DNA, 695 bp, Zea mays
gacaaggaccgccagcttattcaggatcgtataaaggagctccgggaactcgtacctaatggggcaaaggtatcctcttcttctacttgtgcatttcaaatgtgtgttaggaatttaggattatttaaggttcaatggcacttgtttgaaacttcatatgcttgtgcaatgactgttaagcctcataacattttttgtcaacagtgtagcattgatgccttgttggagaagaccattaagcacatggttttcttgcaaagtgtgacaaagcatgcagataacctcaaggactcaaatgaatctaaggtgtccacatacttattaattttgccatttaatttgcagcctttttgagaaggcaatagttactaacctcatgcagtatggataaactccaaacagattcttggtggtgagaatggtccattaaaagactacttcgaaggtggtgcgacttgggcctttgatgttggtagtcaatctatgacgtgtccaatcattgttgaggatcttgatcggcctcgtcagatgcttgtggaggtaaatgattctgttattgcttgtcctttcaactcattattgtcaatgtatgcatattgctaatggtgttgcctgtatagatgctttgtgaggatagaggtatcttcttggagatagctgactttattaaaggactcggattaaccatcttaagg

SEQ ID NO: 5740 - DNA, 439 bp, Zea mays
ctgtcgtcgtaatctgggctcgctgaacaaagtcgtcgcctattgtatcggatgcatggatgcatggatgcaggcactgagcaacgaccggtacaagagcgtgctccaccgcgtgatcgtcaacagcgagagcgagcggatctcggtgccgacgttctactgcccgtccccggacgcggtgatcgcgccggccgacgcgctggtggacgacggccaccctctggcctaccgccccttcacttaccaggagtactacgacgcgttctggaacatgggcctccagtcggccagctgcctcgaccggtttaggcccggaggatcgttggagtgagtgaactacgccggccacgacagggaaaaaaaaatgaaagacctttttgtattcttgagcatctgccaataactggatctttgaaatcctcctctggactggagtctt

SEQ ID NO: 5741 - DNA, 365 bp, Zea mays
tggtgtagtagggtaatgagagaagctacttttcaagatagcaatgggagaccatgatgaatccaggccatatttatattttttcttgaatccaccagttacgttacgtgggaatgtcttgagttcactggttgcattacatctggaattttgctgccctcggatgacccagccacctttgcattgggctccgaggatgttgccactcagcttccccatgttttggtttactttgagttctagcagcgatgggagtggcctttgttattgcagtgtcttggtggctgtgtaaagtatgcgttagctctagctgtctcaggtttaatttgtccccattgaagtagttgtgcctttgtcgatgattg

SEQ ID NO: 5742 - DNA, 471 bp, Zea mays
cttcttcctcaggaactcctgagccttctgaaggtcgccgtcagactcggccagagctttcttgcagtccatcatgccagcgccggtttcgtctcggagttgcttcaccaacgaggctgaaactgcaacagccggcttcctggaaacatgtgtgccaaatgtgagtggtgttgtcactaagaggagtataacagtatagttcagttattagaaatgcttaaacacgtaaacacagcatgaggagggagattacttctccgcggattctgttgtttcagcaggcttgtcatccttgggaggagcagatggtggcggcttcgctgctgtctgggctgcaacttcagcagcaaaatcctggcttttcttctccagcccttcacctaggttgtaccgggcaaatctcctgaccttcatattctctccagttgtagctatagtttgcttcagccactcacttattgtgaccttgac

SEQ ID NO: 5743 - DNA, 411 bp, Zea mays
tactctgcatcagtacatgtgtcaacccgcgccccgcttcggcgggaaaagaagggttcaagttggccgcccactaactttcgccaaatgcatctgcaaccttcatgtcttgttggaggtgagatgaggttctattatcgcatgacatgctcacagattcctgtgcatggcatgcctatgatatgtggcccatcatttcctcccctgtatccatcccatgcatcaaagtttggtcagatggccacgtgggacaaaaggcgcagtttcttgctgctgctccagtaagaaagagcgggctcgaatcgcgttgtcacaggattatttttgtatcgatcagggtggccaagtccatttatgtcagacatatcctccctgctgctgctggtagcgtgtgaatttcctagcattctt

SEQ ID NO: 5744 - DNA, 545 bp, Zea mays
ggttaatcaggctcagaagcagcgacgcaggacataccgtgctcatggacgcatcaaccgtaagtctatctaactaaagttgaagttttgctatgcgatgaactgttcttcatttggagcttaacattctgtttgcctacctggtccagcttacatgtcctccccatgccacatagagctcatcttgtcggagaaggaagaaccagtgaagaaagaggtatgtggacatgtggttgtgtacactgttgcacttgattacctgattcagtgcatgggattaatgttgtgctattgtggtcaatcgtttccttttcaggccgagtctcagatcgcaaccaggaaggcttagagaaggggctctatcttctgtgattggcttagtacaagttttggctgattatttgttgtctcatactgtttacctgagtattgtttgcaagtgctttatcactgtccgaactgtgcatgcaattcactggtctagagtattgttcgtggattgtttcatatttgtgcgtatggctcatgtctgttgctttgcttta

SEQ ID NO: 5745 - DNA, 721 bp, Zea mays
gggcgtgggatcagcctcgcagtactaacaaatttcggctcgaacgctctggtgacatttgcgttttcacccttgaaggtattgcttctcatggttgctacctcatgttcagtttcatgatcctaagatagtaaattacattaaaaaaagtaataataaacgtgccatatccagcagatgtgcccgacaaatgcttctccactaaatagccccgtttttatccttgggcatagagaaaactcttgtatggtcagaattcagcctcctgttaggtctaaactctagactagtttgctttgactatctattcaaaataatggtattaaacctttctctctgttttttacgcaaatgtgggaaaaagctatattcttgtggttttgttttgtcgacacaaatgtggataattctctttgtgccacaggagctcctcgggccagccaatatatttttcctgttcggcgtcatagcagtgctctccctcgtgtttgtgatcctcgtcgttccagagaccaaaggactgagcctggaggagatcgagtcgaagatcctgaagtaattaaaaaccgttcgtgggatcacaagccccatttggagatattgtaagtagcgatgccattttcaaaacgggcgctcgctcactcgtaggatcggagccaaagctttcagacatgggagtacatatgcaaagggcacgtctcggtgtaaagcttggacatct

SEQ ID NO: 5746 - DNA, 1355 bp, Zea mays
  misc_feature (20)..(20): n is a, c, g, or t
  misc_feature (736)..(737): n is a, c, g, or t
  misc_feature (788)..(791): n is a, c, g, or t
  misc_feature (796)..(886): n is a, c, g, or t
  misc_feature (889)..(897): n is a, c, g, or t
  misc_feature (899)..(906): n is a, c, g, or t
  misc_feature (908)..(911): n is a, c, g, or t
  misc_feature (913)..(936): n is a, c, g, or t
  misc_feature (942)..(948): n is a, c, g, or t
  misc_feature (951)..(956): n is a, c, g, or t
  misc_feature (961)..(970): n is a, c, g, or t
  misc_feature (972)..(976): n is a, c, g, or t
  misc_feature (981)..(981): n is a, c, g, or t
  misc_feature (985)..(1006): n is a, c, g, or t
  misc_feature (1008)..(1022): n is a, c, g, or t
  misc_feature (1024)..(1035): n is a, c, g, or t
  misc_feature (1037)..(1039): n is a, c, g, or t
  misc_feature (1048)..(1060): n is a, c, g, or t
  misc_feature (1063)..(1085): n is a, c, g, or t
  misc_feature (1087)..(1087): n is a, c, g, or t
  misc_feature (1091)..(1102): n is a, c, g, or t
  misc_feature (1106)..(1114): n is a, c, g, or t
  misc_feature (1117)..(1128): n is a, c, g, or t
  misc_feature (1132)..(1142): n is a, c, g, or t
  misc_feature (1144)..(1147): n is a, c, g, or t
  misc_feature (1149)..(1150): n is a, c, g, or t
  misc_feature (1152)..(1170): n is a, c, g, or t
  misc_feature (1172)..(1181): n is a, c, g, or t
  misc_feature (1183)..(1183): n is a, c, g, or t
  misc_feature (1185)..(1185): n is a, c, g, or t
  misc_feature (1187)..(1190): n is a, c, g, or t
  misc_feature (1199)..(1213): n is a, c, g, or t
  misc_feature (1215)..(1225): n is a, c, g, or t
  misc_feature (1227)..(1228): n is a, c, g, or t
  misc_feature (1230)..(1241): n is a, c, g, or t
  misc_feature (1243)..(1249): n is a, c, g, or t
  misc_feature (1253)..(1263): n is a, c, g, or t
  misc_feature (1266)..(1274): n is a, c, g, or t
  misc_feature (1279)..(1295): n is a, c, g, or t
  misc_feature (1297)..(1298): n is a, c, g, or t
  misc_feature (1301)..(1325): n is a, c, g, or t
  misc_feature (1327)..(1342): n is a, c, g, or t
  misc_feature (1344)..(1349): n is a, c, g, or t
cctgctggccgcgtttatgnacttatatttccacagagcgcagtgctttcgcttgcatttgacgacggctgatatgctcgcagaatcagatgctactcgaccagctctttgatctcaaaagcaaggtaataacaatgaggagctccgcttatatatatataccttttgcctgcctttacttctgttccatacatctgcaccaaattaaacaaagaaactttgtagtcatgtaatgccgagctagttttgcaggaacaagagttgcaggatctcaacaaagacctaaggaaaaaggtaactaaaaacgctagatgtatgtatgcccactttgacgtaaacgtactgttccgttactgatttcatgcaagtgctgccagctgcaagaaacaagtccgcagaatgtgatccacgacgtctcctgggaggaaggcgggcacagtgggagtagtgttcttggtccgttccagggactccttcagcaccatggcaatgatccttccctgcagacacggtaagtttttccaggtgacatccatgaagccaatagccacacacaacgactgtgttatctgtacgtacttatgcaacctcaatcgcattgattaatgagtgcgtgtgtgttcgtcctgggcgaacaaaggtaccatcagcaggcctacatggaccagctgaacgaggacatggcggaccctgacgagcacggtcggtctggatggatatgagatgctccgatcanntgcccccccaaataatgtcgatgcatgcatatagtttcctgcggtatgcgnnnnatatnnnnnnnnnnnnnnnnnnnnnnnnnnnnnnnnnnnnnnnnnnnnnnnnnnnnnnnnnnnnnnnnnnnnnnnnnnnnnnnnnnnnnnnnnnnaannnnnnnnnannnnnnnnannnnannnnnnnnnnnnnnnnnnnnnnnnaaaaannnnnnnaannnnnnaaaannnnnnnnnnannnnnaaaanaaannnnnnnnnnnnnnnnnnnnnnannnnnnnnnnnnnnnannnnnnnnnnnnannnataattaannnnnnnnnnnnntannnnnnnnnnnnnnnnnnnnnnnanatannnnnnnnnnnncccnnnnnnnnntcnnnnnnnnnnnnctcnnnnnnnnnnncnnnntnnannnnnnnnnnnnnnnnnnncnnnnnnnnnnananannnntttcctccnnnnnnnnnnnnnnnannnnnnnnnnntnncnnnnnnnnnnnnannnnnnnctcnnnnnnnnnnnccnnnnnnnnntcttnnnnnnnnnnnnnnnnntnntcnnnnnnnnnnnnnnnnnnnnnnnnnannnnnnnnnnnnnnnncnnnnnntccaac

SEQ ID NO: 5747 - DNA, 374 bp, Zea mays
cccctaaatatcggtttggttggctagttggtagctttgttgcctcattgcctgctgcaatcagtgatctgtgccgcctggggtctcggaccatcagatctccagctagcttccttgctacttactcccctacccgctgcaccctcgccatggatccgccgagctccgatatcgtagtcgacactccatacttccgcatctacagtgaccggcgcatcgaccgcttggtcggcaccgataccgtgccggcgggctttgatcccaccaccggcgtcacctccaaagatgtcgttgtagacagcgacgccggcgtctacgttcgcctgtacctcccggacacggctacggggtccgatgattccaagaagctcccg

SEQ ID NO: 5748 - DNA, 354 bp, Zea mays
aactattttgtttctttctaaataaattattgattttacttgtgtattttaaatacatagcaaaatatatgtacctagtaacctagacaagctaatacgtcatatatatgtttcttgcatgcggcatgcatgagcctaataatagtccggtgtttattctgttgtttactgcagaggtcggaaactgtgtgctttcatcgaacgccggctgatcatcaactcgaggaacaaaactacgtcacatctagcttgcttgaggcgacgatatgatgatgctaattaacatatatgtcgatcagtatttctggggtgggaataaattttccatcgttctgcgtggcaaactattatcta

SEQ ID NO: 5749 - DNA, 533 bp, Zea mays
acaagatcttccatgggaagtgggggactattcaccttcgaatacattactagtggatgattccccttacaaagctctgcgtaatcctgtatttgtccaacctcttatgccaagcttttcaaagttcacttatactgaatacgagacaccaactgcttttctctatcttgtgcagccgcatactgccatttttcctcactcctacagttacttaaactggaatgacgattcgctgggtatgtgctcatgattatgatgctttacctataccttactacagcttattcatgctttatgtttcaaattcctcataagcaggtcccaatggagaccttcgtgtgtatctgcagaacctagccgctgcagataatgttcagcattttgttcgtgataatccgtttggtcaacctttcattactgagagcgatccgcattggaacttctatgctcagattgctgatagagggcgtgcacccttgacatgttgtgcttgaactcccaagggtcgtgcttttttctgggagttctgtggt

SEQ ID NO: 5750 - DNA, 893 bp, Zea mays
agctggacggaggccacttttgatggtaaagaaaagatatattctgagttaataatttctctaacaatacaatgatacgcagttctcgtgataataatgaattaggaccacagcgataatatgtgttctacaatatttcaggtatctgcagctggaacatgcctgggttgcctactagttggattgtcattcttagctaaggtctggtgcgatttcgtcctgataataagattaacaacttctcattcgtcagaacagtgtcattttttttcttcatggaacaggaacatcactggggaaaggacctgaacttagtgctggctttggcaggcattctggtacattactctttattgcctattttcctataatttgtctagagagatctcgctccggctctttcgctcgtgcgcgtgcgcacacacacaaactgttgttctgacgatctttatcatttgcacaccagattttcggtggatcattttcactgggtatgggaggaataccctgggttataatgtcagaggtacctttactgccataagtaatggcaaaaggatattaccgttcaaaccaaaaaattaagaacaggcagattgaaagtatgcatgaactgaacatgcagatctttcccataaacatgaaaggagcagcaggaagccttgtaacactcgtcagctggcttggctcgtggatagtctcgtacgccttcaacttcctcctggtgtggaactcctacggtaagccaaggcgcaccaagtggtatagaattctggtcagagtgttgcataccagcatcggcataaacattgactctgcagcaacttctgatgatgatatatatttatgtgtggcttggacggaatgcaggcacattcttcatcttgcaagca

SEQ ID NO: 5751 - DNA, 1043 bp, Zea mays
  misc_feature (28)..(30): n is a, c, g, or t
  misc_feature (1028)..(1028): n is a, c, g, or t
  misc_feature (1032)..(1039): n is a, c, g, or t
tactgagcgcgcctgcagcgttgccttnnngttttatcctcctcaggaccaagaagtaaagtggtgagttgaggtatggaccgtctcaattcttcatacagcatatcattatgataagcagcattgccaacctggcaaggcaagaatttaacaggtaccttaatctgactctattctcttgaaactgaattgaaaaaaaaatcaactctgttaaaggcattttacaaacttacggcaaaacatgcaaactttcgtgtgcgcttgtcaggatcagaacacctgtcaaccacgagctggatcaccttatttgctgcctgtaaccagacaacagcaaagttaatattactggcatacagtttcagtccgcaaagcagtgaaaatatacatatttccttacaagtgggccataaaagtaggagctatggcggcacatgttgccaatggcactacaagcttttgcccttatatcagggtctccatttgataagaagttcttcagaagaacaacaagtccagctttatcaatgggcacataaaagtcctggtagccacaatcaaaatgtatcagtttgtacatccaacaaagttttgacttttgacttcagaatacagtatattgatgcacagagatgaagagaaaagacaaaccttcgacatgcgagcaaggtcagaaataatcatgaggaaatcaagcaaagtctcctttgctataggaccctcgagtaatgctgctactctacttggatctagaagaccttctttatgaagctgcaaagcaagtggcctgtagcctgccattttggccacaatggccaagggcctacctagatcttccatgtcaacatagtcaagacaacgcagcatacatccaggaattccaacctgtacgaggagagagaaatcacagaaatgtccactgataggcaagaaaaggtagagccaactataatcagacctctagtagaacttgaatgtactgaggcatgttttgctctatagttttgagcatttccttatctcagtaccantcgnnnnnnnngggg

SEQ ID NO: 5752 - DNA, 372 bp, Zea mays
atcggcacttgtgggcccctgccttccttagggacactttctcagctgggctctgtactgttagccagcgtgaaagtccaagtacattttttgaggatgcagtcagttcagagaccacattggtgacgttccttgccagctacatgacacttttggataacaaatacaaaatggagcaacaagatgattttgattcattaaatagcagcaggctcctgatatcaaagtaccaaatggaagaacagctatccagattgtacaccttgaatatgtttatgaagttccaggatgagctaaaggcaaccatgcattgtcaagttcagctggatgggtcagcatcttcttttatagttattggtttgactgaagcag

SEQ ID NO: 5753 - DNA, 706 bp, Zea mays
  misc_feature (682)..(685): n is a, c, g, or t
  misc_feature (692)..(694): n is a, c, g, or t
gactaaccatctagtatgcttctaattttccttttatgaatatatgtccatcatttcaccatatgtgcttaagatcttttatcttttgtttaactaggtccaggagagtgctgcttcccaatatgcaagattggaggagctgaagaaacgtttagaatctctaaatcccataagggattctgttaatgtgtcagtaagtgaataaccccaaggccatagatctgatgtttcatctttgaaattatttatttctcactgtcagtatttctgctttagtattaacaggaacgagtcttattgattatatgtttcctgtttgctagtagacattagttcttttgttgttttctgagcagataatgttggttttggtctcaactagtatgtgtatgttccgtattattgtctcaccttttcttgtatcagggtgtttatactgcacagcatgctactctgaattcagtacctcagcaaccaactgcacaaaatcctgcagatgtaactggccgtcagaatattgccacaaagcctgcttctatgcaacagcagcctatacctgcggaggcagaaaagaagagaagaccctcgaattcggcaagagggaggggtggtgtcatgatccttccgaagggaagagagggttctgggtcaggatggacaggtgctgggtttgatgtaaatnnnnaaaaaannnctgtcctcctga

SEQ ID NO: 5754 - DNA, 523 bp, Zea mays
  misc_feature (515)..(517): n is a, c, g, or t
tctccgttgtctgtcccaccagctccccatgatgctgtggcaccaaagcattaacaagaatgaatcaggataagtacagttatcttcctagtatttaatctttggtacacattaccgaaaggatttgtagttcgctctactgcctccttggctatccttttctgtcgtagagcatatgttgctactgcaacaaggccaagaataaggacaacacccccaattgatattccaattattgcagccttgcccatcgagggcttcttattgctgggaactgaaatggacgtttagcaattcaagatacgtcagacaaaggtggtataaaccttgtgaaatgtactgtttgcatacctgtaaagtatgtgttcgctatgaagctgtatggtccaaaattgggtggggctttataagtttggttgaccagaggagaaatgattcttatgacttctgagcgattgaagctcgttccactggccggaaaaatactcactatgaatgttagagggtttccttgnnntgaatt

SEQ ID NO: 5755 - DNA, 375 bp, Zea mays
ccatcgcggttgcctccaccaccagtccacggctgtcaccgccgcactcctccacacagacaccttctagagtctaggttccccaggccccacttgccagggtctatcttatgatcttatcccctcctgttatctctgctttccccctttctctcttccgaaccgtcccattcccgcgctctcggcttctcgcccgcctgcccctccgcctgtcagcgcgccggtcgtctcgcctgcaggagagttcgaactctgctccttccagccaccgtaaccatggcgacgcctccgctctactccgtttccactcaccaccgcgccccaccaccatggccgcctccgaagactgccactagtccgcgaataacctttcaa

SEQ ID NO: 5756 - DNA, 410 bp, Zea mays
gctgatgtatctgcgctagcatcatggtattgtgaagctgagaactttgatcagcctatcattgtcataattgatgatttggagcaatgttctggcgatgtgcttggagagtttgtgatgatgctgagtgagtgggtgtttaaaattccagtcttctttgtaatggggatagcaactacccttgatgctccaaagaagcttctctcgtcagaggctcttcaacgattagagccctgcaaacttaccttggggtctccctcagatagattgaatgcacttgttgaggctgtccttgttaaaccatgcgctggattttgcatcagtcatgaagtcgcactgttcgtcagaaattacttttttaggcatgatgggacaataacttcttttattactgctctcaagcttgcatg

SEQ ID NO: 5757 - DNA, 383 bp, Zea mays
ctagttagcttagcatcccaccacaccacaccaaggtcacgcggcggccggcaagaatggcgacgcaccacctggcccagggccacccgcaggcgtggccgtgggggatggccatgtacaccaacctgcactaccaccaccaccaccaccaccagcagcagcagcagtactacgagagggagcacctgttcgagaagccgctcacgccgagcgacgtgggcaagctaaaccgcctggtgatccccaagcagcacgcggagaggcacttccccctcggcggcggcgccggcggtggcggcgacgggaacgagaagggcctgctgctggaattcgacgacgaaggcggcaggccgtggcggttccgctactcgtactgggtcaac

SEQ ID NO: 5758 - DNA, 404 bp, Zea mays
gccacctggatacggcggcggaggaaacagtcagcccggatacggtggaggatacaagcgccatcaccctggtggcggctacgggtctggacaaggagggcctggatgtggatgtggaggagggtatggaggtggcaatggtagtcctgggtacggcgatgacaatggtggtggcattggcactggtggcggaaatggcaatgctggtgggtacggaggaggaggaggcggcggttatggaggcggctacggcagtggtagtggtacagcaccaggaggcggatatcatggcggtggtggtgcacaacgctacgctgggcaaaactagcaagaacaaccccttatgctagtttatgttaaataaacgatccattgttcatgtgactgagcaatttaagcagtga

SEQ ID NO: 5759 - DNA, 528 bp, Zea mays
  misc_feature (517)..(525): n is a, c, g, or t
atggggagagcctgttggtagatgcaaacggttcaaggtttttctctcgtctatttcacgttcaatgtgttccagaaagagtacattacatgatctgtttattcttttcaccgaaagggggggacttgactacattatcgattcatgattacaggtggattgaagtttgggctgatggtgtacttatcaacagaactaaaatggagaaataaggttcagatctaaatacattttcctgatgtttctaaaacttggctcctcggatggctacgcttcaaagtctcagatattgcaaggcactctggttcggagcctctctactgtacacgaagtcgtcgtatcttcagtcttgaaagtcgtaaataggtgcctgttggaagcactgttgaggtttcgatgccctaatttcaaaggggcagactgcaggcaggcgtttctgtatataccactagactacaagtatgggaggatgcctttgttcatacggctgatggatcaagctgggaacagctataannnnnnnnnttt

SEQ ID NO: 5760 - DNA, 465 bp, Zea mays
gctggaccccaagtcgatccttaatccctacaaggttctgccgcagtctgtactgtagctaaaaggtactctgttatcctgtagttcgaaggagttatttccaaactattataacttctaatcggcttatgtcaaatcacatttctcctgtcaccagcaggttaggaccctgtaagtaaaggagtttgttagggctgcttgatgcttgaatggactgtgagcggaggcaaccgaataattgaggcgaacatgcttatcggcgtgcccaatgtaatgattcagttggtggcgtcgtcaaaccacatcggatgtcatctggagaaagagtcattttactttgtcattcaaacttttaggattagcattgaaattttcaggattcacagtacataatttgaatgctaacaattcaggataccatctgctagcatataagatgtccagtccagaggataaactgctcat

SEQ ID NO: 5761 - DNA, 358 bp, Zea mays
cgcaagtatagttacctataatttgctgctaaaaggtctttgcagaagttcacaaatagatgaagcggaagagttgatttacaccttaagaaatcaagggctgagacctgacgttgtcagctacaatactataatatcagcatgctgcaacaagggcgatactgataaagcattggagcttctccaagaaatgaacaagtatggcatcagacctacactgagaacgtgccatacacttgttagtgcattggctagtgcagggagagttcatgatatggaatgcctatatcagcaaatgttgcacaagaatgttgaaccgagcagtagcatatatggcatcatggttgatgcctatgtg

SEQ ID NO: 5762 - DNA, 390 bp, Zea mays
acaattggttagatcccctgacaagtacagttgcggtcctacccatgtccttgattccagtgatcttcacaaccttgccctctccaacagagacttcctcaacaacatctgcatacccaaacttatccgtgcggaagtgctcaatgttggcaatgggaaggcagtttagggtcttggtgatgaactccatctcatccctctccacgtccttcaccaccagaatctttgccttagcaagatagtgcagagacaagtcagtgactgcatcacgcaagatgctcttctgaatgagcaatacattgcatccagccgccttgatctttttgaccatcccaaggatataattgcgctcctcacgtaggatgcggtccatctgtgcgtagtcggata

SEQ ID NO: 5763 - DNA, 480 bp, Zea mays
ggatcaaggagcgtgttgaagagaaagaaggcattcctcccgtgcagcaaaggtaccatgctgattattattttttgttatatctgcaactgttactatttgttcttcggaatgcttattctacttgaaaccagttatgctttcctgacgtctgatgctgatgaagctattttggtcgcctttgcaggctcatctatgctggtaagcagcttgctgatgacaagaccgcaaaggactacaacatcgagggtggatctgtcctccatcttgtccttgctctgaggggtggttactagtctaaacctgatgaactagcagtcagataaactgttgtgttggctgcgaaatgtgcaggcctgatgttgaacttgcaaggagataataacaaattatcagctttgcgcctgtgcccagtggaaggggctgtcttccaagttattgtctgatatggaattgttccagattatcatgtctcggcgt

SEQ ID NO: 5764 - DNA, 494 bp, Zea mays
ctattctttaccaagcgctattttgttctcctgacagcagcagtcctcgtgatcacttggctcaatctcaggtaaaaatgattttttttttaaaaaaaaatgggaagtcatttttaacgcaatgtcagttcattgaacagaggcttatggtgtggattattagttgaaaacctagaacagagattgtagaagtcaaatcctttgtttgacttgactgcagcaatgatgtttatgactcggatacaggggctgatagggacaagaaagaatctgttgtcagcattactggcaggtgccgtactcttgtttcatagagctagtagcattgtaaatggctggcaactggcatggttggttttagaagtgaaacatgatgctatgttgtgatctggttatgcagccgagcaatgacacaaaatgcggcgaacttttcccttttcctcggctttgcagggctactttgggcctttgcagaagccaaggatatcagatta

SEQ ID NO: 5765 - DNA, 707 bp, Zea mays
ggagcaaagtcttcaagtgtaggaaggcttacaagaaagtaggtattatcgttaatgataagcatccttttccttgaatttctcacctctcatttatcccttttttgttgtttttatgaaaaagggataagggtatgcataaggtcgttttcatgagtggcattttaccagagggcactgatgttggttactatgttggtggaaaggtcattttcttattttctcaaattgctattttcagccagtacaaatgtttttttattgacacttaagtaaatctctagaggttactggatggatatataaaggaacttgggatctactgtcattgctgcagcacagtggtaagttggtagtccctttcaatggaatgtgacacaactcaactgttaagcctgcctagtctaattcagtccgtttaaaatgaataggttagtccttcacagtttgaaggtcatgctggtcgagctgctcgacgcaaaccgtgagtttattctagcttcttttttttgtaaagagtacaattcaagctctaataccttctacaaacactattgtagttaccacaacatatatatgtcaaacggcgtttcactacatgagctgtcaatttcactcttgaaaggtcaaaagatgtcaaacagacaaagtgatgacttgtgcagcatttgttcagatggtgggcaactactcctttgtgatacctg

SEQ ID NO: 5766 - DNA, 367 bp, Zea mays
ttcgtcggaagacatggctgcagaacgtgaaaattaagctggtgattcttggaatccttttgctccttgtgatcatagtctgggtatctgtttgtcaaggctttgactgcaccaagcatgaaacatagtagtaataagaatggtgcagcacgactgtggcagagctgcgatggatgcgagtttgtgctggtgaggtcaagtgtgtacccacatatgctttggctctcaagttcgattccaccagacaagtatcacggtacaaatgtaagtccgagctggtctttgttgcacgccggaggtaggtgtacttgcaatgcaagactagcatgatataaagtgatagcatggttccttctgtactagctga

SEQ ID NO: 5767 - DNA, 509 bp, Zea mays
  misc_feature (117)..(119): n is a, c, g, or t
cagtgaacggcctctagtcttgaatcttgattagagcactctttattcacttactggctctcgtcagtcgtagtagctcgaggcacgttgaaaaggagagagaaaatcagtgaacgnnnctctagtcttgaatcttgattagagcaccgtttattcacttactggctcgcgtcagtcgtagtagctcgaggcacgttgaaaaggagagagaaaagatctgtttcattcttcaatctattccaagctagccataaatagccaattctcttgctgcattgtttcgatgaatttttatctgggagaaattgagagtggttggtagtaaactagtaacaactttacgaagagatgcggccatcgtgccgaattaattgggcggaggtacggtacggataaatagcgggtcgtgtcgtattcgtggatcaaagtctaagcttaaacacggactaattagtttttaaacggtcatgtcgggctattatatcgtatcgtgctaaatctaaggcctg

SEQ ID NO: 5768 - DNA, 359 bp, Zea mays
gcgtcactgatgagtaggacgtgttacattctgttaggttgtgcacatgatgtgtttgtcaatcaaaagctgttgccaggaacaattgccctgttagagtgattcattgtagtgcggttttgcatgcggcaggtatgacaataaattgccggtttctcagagcttagcaatgctgcagaaactgctgaataatcgagtgtaatcggggtccgtgagcaatcacatctttgtcagtctcccttgttttgtttgtctcattgtttgtagtaccttgttcactgagatgatagtgttgattattctttggtccacctgtaaccacttagcgtctggtgtgtttaaggtagtggtcggttccg

SEQ ID NO: 5769 - DNA, 460 bp, Zea mays
caaaatagtgccagcgatgtccaggtaagcaagaatagtacctaagactaccaggaaaaacaggcgaaaccaccaagaacgaagcgctcacccatgattcccacggcggagatgggattgtcgcttcaccccgcagtgatgtcatcatcctgctgcttacggcacggcccaaacaaaatctggtatgggatggtgaccgtagcctgcaacagatatcaagagcattggcgtcaaagaagttgaagaagcaaagtgcacggaagaaatcaaaggtaaagcgaagaggatttctcacctattcctcgcttgctacagcaagcgcgtgctgcggcacccgatggtgtctgcacaaaagggagaagtccagggatggagaaccctcactgtcaggcgccagtcgccaagcccgtcactctttcttttttattgctagttgcaccagcgttctaaatgttaaaca

SEQ ID NO: 5770 - DNA, 398 bp, Zea mays
cgatcttgatggtgtcgttggccttgatgagagggtcggggtagcggatggtgcggtcgccgtaggtgttcaggtaggggatgactttctggccaaactgaacagacctcaccttgcagagcttgaactgcacacaaaccaatacaaagtgtggttcttgaaagacaattgatccttgaaagacaattgatcgcaacagccatttcatccatcatatcatgccattctcgcttgtgggaaattggaggatgcatgctttatagaatacttggatccactgtacaaattgatacttttctcctatgctcaggggatagatccaattgagcactatgaaaagccatgtcgcgcaaacctgcgccatttcaaaattaagcaaggtagaagcaagcatacga

SEQ ID NO: 5771 - DNA, 335 bp, Zea mays
gggccgcgatacactgcctgaatttgccggcaacaacatcagctgcgccgggtttagtactccaactatcagcggtggaggctccttcgtgttcaagactgaagatcttgacgaacaagaggagcaggagttggcttcacactgcgacgacgttttctccgtgccagtgggaagcgatgctctgcgggcgaccgacaccttcagcctcccaaggggcgggtacggcgagctgcttaggcaggggttcaagttggaatggaatcggacatcggaggatcagtgtggccagtgcgagggatcgggctccggcggacggtgcgcctacagccagaaga

SEQ ID NO: 5772 - DNA, 389 bp, Zea mays
ctctcatcagccgtactacatcgccgtcgctgcttcaaccctgattatcgctgccgccgcgcgcgcggtgcagaggcaaaaactagctacggccggccgcccagagtgcaacgcaacgcgtggcttttgagtcgggtaatcttcatcgtctcccgcccctcacttcgcgcgctcatcttttgctcctgttcatgctgtcatcccgtctgaacttttaaccacgcaatgcaagcaatcaatcaagcctctgcaagctaggatgaggatgatagattggattggataatacacaagtacgcagggagttgttgtgtgattttttttcaggttggggaagaagatcgaccaacatgtaaactaataagctcggttcaattaagcagatggga

SEQ ID NO: 5773 - DNA, 438 bp, Zea mays
gctgagggagacactgcgcaagtggctcgacgacgagtactgcccggagccggccaacgtggacatcagcagcaccgccgcgcggtcgtatcgcgaatccctgatagcgcggcagtctgatctgggagagatcttgctgaggatggtgggcgacctggacaagctgtcgtacagggagagcttccacggccccttctcggccgccaacgctgcagtccgtttgatcgctcagaggatggaggagtcactgcctgatgaatgacggtggtgcgcgacctggagtttctatatggcacgacttttgatgaagtcgtaggctatatgtacttttgatgaagaacaattcgatcaccattcctcaccgaggctgtcgctgacagaaaatggtgagaataggctcgagacttcatttttctgctgaaattcgccaacgtacta

SEQ ID NO: 5774 - DNA, 826 bp, Zea mays
  misc_feature (795)..(796): n is a, c, g, or t
  misc_feature (820)..(820): n is a, c, g, or t
tcttcggcacgcgctgtcgctgtacgaggtacgtacgtacgcctccgttctctactcggacaagtgctgggtggatcgggaagtaccactggagtcacggcctagtctgattagagcctttttttttccgtgcgccttgacacttggggtttatagtaccatcatgatgcttgacggcttggatggacgctgctggtgcaggactgccacgtgcacgcgatcgcgcgggactacggggcgctgacggcgcagaaccggcagagcatgctggaggacacggggttctcgttcgtcaactgccgggtgacggggtccggcgcgctctacctgggccgcgcctggggcaccttctcccgcgtcgtcttcgcctacacccacatggacgacatcatcgtccccaacgggtggttcaactggggcgaccccaaccgcgagctgtacgtcgtccccatctatccatcctctgctgttgcttgcgccattgccttctgatggggctagcggacgccatgccaggcgtgcaaaagcgcacacaaagggagggaacactcaccgcaccggctccattccattccattccacttccggtgaatcatccgtcgtgatcgtggaggggcttttaagattcgattcccgctggcccgccgccaccagcacaggcgcaccgcgcacgggcagcactcacccgtcaaatgccaaaggctaccaaaaaatgaccttctctcgtgttgctgctgcaggacggtgttctacgggcagtacaagtgcacgggcccgggcgcgacctatgccggnncgggtggcgtggtcgcacgagctnaccgac

SEQ ID NO: 5775 - DNA, 712 bp, Zea mays
cggtggggacttgcagatcatctctatggaaggatatggtatgtacatacttaacctttattatattcagatattgagcacactgaagaatgcggctgtattcatctctgtttgattttcataaatcagtatgaagttaattttctgaatgctgattattcctgttttgtaaagtgcaagtgaaggttaaaatatttacacatagaccttgggaagttaagcataaatgccaattcttgcacattattttagcttttctaatttgctatgggaacttataacgcctgaaattcagatttccattagcattaggatccaattgctatattgctgcaccagtttccttgcagaaatacagcatagctacactcttgtcgtttagttgatcactattattattttttctgttttaatgtaggaactgatgcttacctccacctttcacggctgggagattcggaggaacccttgccgtaatttattcaaaagaaccattcctgtaattaggatattgcttctgtgctggtatgcaagtatagttctgaaggccagccacctgttcagctgttggtgtccctacttgttgtctttattgttcattcatcatctcaatggaatgtgatcgtaattcataatcgttttatgactgatttgtactgtcattataattgtcgaacctccaaaaaaaaagttgccgtcgagcatccgaggt

SEQ ID NO: 5776 - DNA, 353 bp, Zea mays
ggcctcgtcatcgtgaaagggctggacgagtggccgaacgagttccagaggctgtacgggaccattgacctgtactggatcgtgagggacgggggcctgatgcttctgctgtctcagctcctgctcgccagagacggcttcgagagctgcaagatccaggtgttctgcatcgcggaagagggcacggaagccgaggagctgaaggctgacgtcaagaagttcctgtatgatctgaggatgcgagctgaggtcatcgttgtgaccatgaagtcgatggaagcgcactctgagatcagccccaacgctaagaaggatccccaggaggagtacgcgagcgcccaggatagaatcag

SEQ ID NO: 5777 - DNA, 801 bp, Zea mays
  misc_feature (748)..(748): n is a, c, g, or t
  misc_feature (750)..(750): n is a, c, g, or t
ctatttgctgatgaagatcaatgcaaaggtttgggacatgattttgtctttcttttgcactgtattgttccctggttcatgattatattatcctatttcctctgtttttaactagcttggtggtctgaactcgttgctgcaagttgaagcatcttcgtcaataccacatgtgtcgcaagtacccaccatcatcttaggtatggatgtttcacatggtcatccaggacaagatagaccttcggttgcagcggtaagatgggtgtacctttacttgtacaattcttctgcccacatggaatctgagtggttttgtaaaatatgtgaaatggatgtctgttaatctgatgtaaaccatacctttcttctttgtttaggtggttagttctcgtcaatggcctcttatctctagatatagagcatcagtgcacacccaatctgccagactagaaatgatgtcctcgttgtttaagccgcggggtactgatgatgatggcctcatccggtaagagatatcttcttagtatgttgatgtatggtaagcgtgatgacttttggatgctaagtttatcttcgtatttgggacttccagggaatcactgatcgacttctacactagctctggaaagcgaaaaccagaacacataattattttcaggtctgaagctttggggttattgttagcttgtatcactaaatcttttttgtagaaacaaattctttttttttgtttttgttttgagaagtatgnanggtacattctttgctgggatggattattgatactttcttagccgccgtggt

SEQ ID NO: 5778 - DNA, 771 bp, Zea mays
gatgggcttatggaaagagttgagattgagatttgctcaaacaccagtgatttagatgctattaaaaaagctataacatcaggtatgagccttttgggtattcttcagtgttttttttaacagtgatgcaatttcttcgtgtgtgctgtaggtttcttccatcactctgcacggttgcagagggatggtacatataagactgtcaagaaccctcagaccgtgcatatccatcctagttcaggattagcggaggcaagttcatttgattgtacatcgtctcttttttcatagcattcataattctacattttcttctgcgagttttagttatgatctcgtgttatgtgcttgtatatatgttgtatgcaggtacgtccgcggtgggtagtgtaccacgaattagttctcacgacgaaagagtttatgcgccaggtatgcccttttttttcctttcagaatctcatcaagacctgcaggagaatttgttatgtattgttttgaaatactgtggcactgcaggtgacggaactgaagcctgaatggctggtagagatagcaccacattattaccaactaaaggatgtggaagactgtaagtcttgattgtgatgccgttaactgcccatcctagtttttgttgtatgagctacacgacttaaataaatgcctctttctttttcctgtacagccggaacaaagaagttaccgaagggccaaggacgagctgcattgtagctatgatacatgaagtttcgatggatgtattgtgtt

SEQ ID NO: 5779 - DNA, 376 bp, Zea mays
attcccaatgagtcccaacaaaagaagcttgatttgggggttttcttgaattattttggctaagctctctcaatctttcttgttgcttatcaaatatactttaacttatataattggctcaactcaaaattttaaacttttcatcccctttttcttattttcttgaattttgctcatggggctcacttagggttcttaattagggttgcacattcttatcttttcaaagactcaattgttttgatcatgacacttttaagtacatacttggtgaattctttattacttaagttaatttgatgctcatgcttactttgatttacataaaatgatggtttttggttgggctttacaagagaaaccctaggtgacgcaa

SEQ ID NO: 5780 - DNA, 969 bp, Zea mays
tgactcgcggtcgattgcgtgcagactctttcagcatttcaatggtcggcgttattagcaccactgcaccaatcaaaattgctcccgcgtactcccggcaagggaacgtaacgccgcttctccgcgtgaatactgcgtactcataccacccatctatccttccaggtgaacgatctcatcggtgccggcaagtcgtaccgcacgctgagcgacatcctcgacaaggacatccagaacgactgcgtgaagaagcagggaagccactcccggaacctgcgcagggtccgtctcggcctcggcctcatcaaggccctcttcgagcaattcctcgccaccgagtacgtctcctttacattgagccaaacgcaaacatctcgtcactgaagtctggacatttcaggccagataggccgtcttgactgaatctcaaggcgtctatctgtcctgtatacagcttctgatgtccttttgtgagatggcaacttctgatgtcgacgaatgcatgatccagaactggttatctttcggataaatatatttaccaaattgccagctagtgctcataagctatttaaagccaaattgccagctagtgctcataagctatttaaaaacacagtgtgactgtcaagtgctatgattgacactttgacaggtagatgttttgttctaaaaagatgtatattgacaggtcgctctgttctctggcacttgatttttttcaggggttcattgtatgatgctgctacgacagcttacgggcaggtgtgcgcgccgtttcatagctgggcgatcaggaaggctgttggcgctggcatgtacacccttccaaccagggagcagttggtagtgcggctgaacgaaactggtaagcaaacatgaacacccaccaccacgtttttaagcattacattacaagtttaccaagcttcgaatcttggtgccccggaagaaaacgccttgatttct

SEQ ID NO: 5781 - DNA, 790 bp, Zea mays
ctgatcctaccaagcaaagttgatccattggtcaatctcatgaaagttgagaaggttcctgattctacttatgatatgattggaggtcttgaccagcaaattaaagagatcaaagaggtttgttttgaactaaaatgcagtatcaccaaaatatgcactttctgatttgtgaactcaactttcaggtcattgagcttccaatcaaacatccggaactatttgagagccttggaattgcacaaccaaaggtttattttctctcttgaggcttgaagaccatcttaaccttttgaactttacatgtaggtggagaagactgagatcttatttattttttcagggtgtcctcctttatggacctccaggcacaggaaagacattgctggcacgtgcggttgctcatcacactgactgcaccttcatcagggtgtctggttctgagttggttcagaagtatattggtgaaggctcccggatggttcgggaactctttgttatggccaggtaggctgagcaaatatctccacatttcttttcctgtcgtacctgaagcattagtggttacttgttaggccttgttcgtttgtgtcggattgcacccggaatagttctacctaatcaaagtttatataaattagagaagcaatccggttaggaatcgttccgacccaccaatccggcagaaacgaacaaggccttagtgagttgaagcataactttgcacatgcacaatctgttattatctttcattgtgggcttagtttgttttatctggttcacttattgcagg

SEQ ID NO: 5782 - DNA, 759 bp, Zea mays
  misc_feature (707)..(707): n is a, c, g, or t
  misc_feature (752)..(754): n is a, c, g, or t
aggtttgcttttgccacacaaaattgatgaaccaaagtcattttagcagacgtctttttttttaaaaaaaaggtagattctaacatcctctttcaacagtgtgaaaagttctcaggaacttgaactggaggagctggagaaggcccccaagttcagggccaagccactaaacaaaaaggtactaacacatgtcatagatgaacatacatttgattagattatgaagttggagcttaagtttggggcctcatgtcatgcagattcttgagagtaagggagacattggagtgtttgtccatcctaagtctcaggtcacagctcccaaagaattccgtttttgtaccgatgttcgcttgggtcctccatcagttgctgacttatttgacaaggtatttatttatcgacagccatacggtggtatagtcactatactgtttttttgtcaagatcttattaagctcttgtcctattttgcagctctctcttcactctgaatgttcttcaaacagtaacaggcaaggtgtgcctagatgcaccataccaaaccctttcagtctacaaacagaggttcgtgagatgtaattcttttttgagtcacagcatttctcataatgtgtgtgcaacagaataattatgcatccctttttgcaggaaagaggtcaattaaaagagaggcagctagaagcacaactcttacaaaagaaggnggaggaggaaaaggccagggttcacaaagctaacccttacccatnnnaccac

SEQ ID NO: 5783 - DNA, 376 bp, Zea mays
ggaacttgcaaagactccactaaagctagcaaaattaatggcaactggattgtcatttgcaaggatgtgtggatgcatgaagagaattctcctgtctcgcacttcagtatttatgtaaacaaaagaaaaggtctggtaggaccctaagacgtcaaaaaatgagagaagttaagacaatggacatggagcaaacaagagctgaaagaaacgtgatgctagatacaaatcctatgtgggcctcgtctccacatggtatgcgccatgcagctttctccaggggtgcagctttgagattattgatcacccaaagacaggaaccagaatggatgtccttttttctgtagcggaggaatagatctgcgctaccaaactccac

SEQ ID NO: 5784 - DNA, 340 bp, Zea mays
gcgggagtagttttcatacggtgagaactctgctatcctctggttggttaccctccttaacatatatggcaagtggctcactgtggggtgatttcctttttttcttcttcttttgaaccttgcctctcgtcgacatctgaccgacattgatcaagattttttttagtacggagtgacgaagagttgatatggagctgacgatcatttgaattgatttcgttgtgcaagacttgtattacataaacatttaaatacatgtagctgaacatttcagtagaaatgctacggttgtggtctcccatcgttgactttcattagcgtggtggtaaacatcggttct

SEQ ID NO: 5785 - DNA, 466 bp, Zea mays
cgcgaggtccaggctgtcgtcgacgcggcgcccctgccactacttcatcaagggaatctgcaagaacgggcagagctgccactactcgcaccaccggcaggaggcccaggtctgctccggcgcgctggagaagctggagctggagatcattgagctgctcaagtcgcggcacgggcagccgctgtccatcgcgtcgctgcccacgctatacggcgacaggtacgggaagagcctaaaggccgatggctacctcacggagagcaagcggcatgggaaggccggctacagcctgagcaggctcatctcccgactcagcaagatcacaaccatagaaaggtaaattaattaattaattatcagaagagagaattaaagagatcattggatttgaacgcatgcaggccgcacgggcagcactatgtggttctggcggaggacgccggcaggtacaaggagttgatgagca

SEQ ID NO: 5786 - DNA, 450 bp, Zea mays
cgctgcgtgctggtggaagagacgccagaacattctccgtgctaaaagattagctgcaggtaagaaatgcaaacaactgtccaatgagaaaagcacgatgtacataggtttgtgctgtgacggatcgattacatttgcccttctcattgcagcaagggaagctccttatgcaaaatcaaggacccagttcacccgcgatgtgcaaatggccaagcatcaacggacacatgaaaatgctcggagcagcaacagtgaaggctcgccacatttgctttcctagctcggtgagaatactgcgacagtgacttggcttccatctattcttcagttcctcctttgtatgctcctctgcagtcttgaaagacgaagctgctgtacatactagctaggtcacgaatggtgtatatacttgtattttttttggtgatctagaactcagtccaggagagg

SEQ ID NO: 5787 - DNA, 637 bp, Zea mays
aggaggcttcacgaaggtgaagcagttgcactgataagtgatgctgggacgccaggtattagtgaccctggcatggaactggtaagttgattcacctaattttaagtctgcaaacctcatcgcgtacatgtgattatttattagagaacatctctggctgctatccttcatatcacgtgaaggggccagcagttgtcatctcatagtcactttaccctgatacaaaacattgttactagtgaacagcaccaacttcttgttttaagtctaatgcttcttctaatttaaacctgtcactctgtcagacattaagcatgttctactgttttttcacaggctagactatgtgcaactgagaaaatccctgtcattcccattcctgggccatctgctgcaattgctgctctttctgcatcgggtttgccatcaaatgaattcacatttggtaaataatgctgatactgtactcattttatttttcagttgtaaggaactattggggtcagtccatattttcaattttagttggttttttaccaaagcatgctcggtcaagaagagataggcttgagatatctgctcgtgaagctgctacacaaatattctatgttcctccccatggcattcagcagtttct

SEQ ID NO: 5788 - DNA, 814 bp, Zea mays
cgcctcctctttgaacatcttaacgcatatgcactttgtattttggtaacaagatggtcgtcatgaattatgtttttcaggcgctgaggaaggagcctttgacagtctatggtgatggcaagcagactaggagctttcaatatgtctcagatttggtgagtccctctatcactattaaaggggcatttgcacaaacctatatgctaaatataggtatacgagagaaactatctatacacttgatatctcaaacatgttaaataccagcatccgtgacaatatctatatgctagctaaatataccccgtgctttattgctctgaggaggggagtgcatatttatgatccaccaaatatccgtctgtcagtcatttcttgccaagacatgtagttattcagaaatcatgcttcgtgatgagtatcagtcgccccctttgttctactacccgattcttttggttctaccggtgtcacctatttttccgcaggtggaagggctgatgaagctcatggaaggggagcacattgggccgttcaacctcggcaaccctggagaattcagcatgctggagctggctaaggtggtccaggacaccatcgacccagaggcgcacatcgagttccgtccgaacaccgcagatgatccgcacaagcgcaagcctgacatcagccgcgcgaaagagctcctcggctgggagcccaaggttcccctccgtgagggccttccccgcatggtcactgacttccgcaaacgtatcttcggggaccaggaagggtccaccgaggcagctggtggcctttcttaagtgctaaa

SEQ ID NO: 5789 - DNA, 1115 bp, Zea mays
  misc_feature (23)..(25): n is a, c, g, or t
  misc_feature (1052)..(1057): n is a, c, g, or t
tgggaatgggagatgtactttcnnnttgttgaaaaagcacaagaagtggtaagtcatttcttgtgaaattattccttttgtcttgtcttttgttaggctataatttgatattctgtggcattacctgtttgtacaagtagatgcgccaagaagatgctgatgaattacagaagaagatcttgagtgcaaaattcaactttaatgacttcctgaagcaaacacaaatgattgcaaaaatgggttcattcagtcgtttgattggcatgattccgggcatgaacaaggtacaaatatgaacttctggatcacatttaatatcgtactttggagttatgtcttatgaaagcaattaatgatcatattcaaactataaaattcacattattaagatttaagacaaatattgccatgtttaaataggttacccctgcacaaatccgtgaagctgagaagaatctcaagtttatggaatcaatgatcaatgtgatgactcttggtatgtattccgcagtcaagagacattctgagaattatcttttttgcatgttcctcctgaactcttactgtccagtgtttctttatactgttttaagtcttgtaacacatatctggagcttttatgtgaaacttatttagtattttgattttttgagcccaattgatttgccaagaagtcagtagcttgtctaagctttccttggccagcgctacggaacatgtaatagtgtgaatatatagattagctttcacttgctatcatttgtttggttggtattctactgttctcgtagttgcaagaggggccttaagttgcctcaatctgagagtgctccacttccaaaaatatcaacattttcgttacagttttacaaatatatttgagaaatttattttatgagcctgaactctgaccagagggatgcattcctatcatatcatcatatttaacttcgaggctaaggccactaactaaacagtgtctcagtcaataactaatcctaagttccttgatggcgaaacccatctcccctatctgtatggtcagttgtttnnnnnngcttatgcagaggaaagggaacgaccagagcttcttgctgaatcacgcgagagaagga

SEQ ID NO: 5790 - DNA, 422 bp, Zea mays
ctctagcttcagttacagtcatgacattcatgctagcaggaggcttctttgtaaaggttagcacttagcacgcggaaacgtctgtggcttggaccgctaaaaatatttctgttcttgtgcgttgccctcattctactctgatggtctgcagagcgttccaccattcatctcctggctgcgctacctgtccttcaactaccacacgtacaggctcctgttgaaagtgcagtacgaccccgtgccggacatcctgaccaccacgaggcacatggacagcggtggcaccgaggtggcagctctcgtcgccatggtcatcgggtaccgggtgctggcctacctgtccctgagaagggcgaaggccctgggcagctagcgcatcccttcacgcgcagtggctgaagcctgagctcgtggagctggtt

SEQ ID NO: 5791 - DNA, 390 bp, Zea mays
ctgtaataatcttgagaaggtcaactggagttgcagcagggtccagctcatggcaaccttttggagcattatttctttcctcaccagtgagcaggcaagaaggaacccgatgagagaagcggaaaagctcttccttcggtattcttctgaccacactggagcccgtgagcctgtggaaaactgccctgaaaccagctaccttcaacaatgggacaacagtcacaccttgctcttcagtgaaatcatcgatcacttctactatctcatatttatatatcacatcatctggtgtaagttcattccaatcaggagaccagttccggtacacagcccatgtatcgcctttttggggaataatcctgataattccccgaggacctttactccagc

SEQ ID NO: 5792 - DNA, 510 bp, Zea mays
cggccagtactttgattactggaaatgtgttgacaagaatgtgagtgcttcttgcttatgtatggccatttacaaaaatctattaatcttgttgatgtggccagtacttagtttactgaacagtatcttgttttggttgttgctactatgcaggttgcagaaaaactctttgagatgttaaaatgacaagaaaagttttccctacttcagttatccacccaaagttggtaataattgtatcacttgtgtgacctatagactattaaggcgctcaatatttgttagagaagttttgccacttgggtaacacaaattttccactgccagtttgcatttcatttctgctactagtattgaaccagcaggtttcctcctgcattgttggataaaaaatccatcgaatatttacaagattgtggctgattattaaatgctgtaatacaccttaattgcttttacggtgtattttgaggagcacatagcaaatcatttgggtcctaactttggatg

SEQ ID NO: 5793 - DNA, 1012 bp, Zea mays
ttgttccttcatcacacaactgtgacgtaagttaatttctgtctgttctctgtttagctaaagttattttgatagttcacttcatatgttactgacaagttcaatattttttagattccgcatgtgaaccgtactgagtatcagctgattgatatttctgaggatggatttgtatgtttctctaaacagtaaaactgtaatcttctttagatgaaatgttattcagtcttataatttaatttaatttgtttcaggtgagccttcttacttcagatggcaacactaaggatgatcttagactcccaactgatgagactcttgtggcccaggtctgtatggaaatgctttccatcctaagcgctgctagttttcttgttggcttccgagtattctcgatgatggttttatttgttagcttagtcatatgcgctttctcagtatgttctcttccttaaattttgttaatggattaatggatttggttcttacaattacaagtattgtggaaagtagggccctgtagagctatacagtcccttgcgtttttagtctatctactattccacttgcttgcaaatgatgcaacatgacaaccatgtcgtagaatacatgctgaaagtgcaccaaaagtgcttgcttttaaactgacatgaattcttgttgaaaaatgattttatatacaagtcctgcactctgcatcttgtctgtgctgtgactgagtttctaggacaatgcaattctgatgattgaaagtagtagtgtttgcataacttgtatctgttgtggccgagttaacggatacacctcaaattactgttttttataatgcttctgcattttgtatgctccttaattcagattaaggaagggttcgaaagcgggaaggatcttgttgtgactgtccagtatgcgatgggggaggagcagatctgcgcgttgaaggatgttggccccaagtaacttccttggctttggagacggaaccctactgtatctcaactaaatcgaaaag

SEQ ID NO: 5794 - DNA, 869 bp, Zea mays
cagctgtgcttctccgatgcaggaaggaggatcttcaacttgttgatttagttttggagtctgcaaggaatgagtatgcagataaagcaaaagtatatcctcctgagatagtggtagatcgtcaaatctatctgccatctgctcccagtcattatcaggcacctggcccctcatggtaaggcttgcagttatgtcatggaccatgagccaatatttccttttatgtactgtctactgccatttgttcaaactctgcatttcgtgttcactggattccttattttgatactatctttattttgccataaatgtctaaagggaagggcattgttgatagaaccttttatatggtgtgatcgtgtgttatcctcccagtgttgcctctaaaattttccttatggtgtaactgcaatatgcatagtaggaaatgtcttattttatagaatcatatttgagtgaaacacttctttggaagctggaataagcatgtgggatctgttcctgtcggttatcagaagaatctaatcatgtttaatgcatgttaaggttgtgcatcagaatgctcactgttgtacctcccaatgtagctccggtggagttgtgctagcttcccgagatggaaagattgtctgtgaaaacacactggatgctagattgcaggtagttttcagaaagaagctgccagaggtaagtcacacgtttttctgtttcctttgacattatgatttcagaagtaattctgtccagtttaccatgcatcttccctcgcatctatggtctgatgacaacttctatttgacattcttatgtttacagattcgtcagagccttttcgggcaggtagctgcgtagccaattctgaaagcaga

SEQ ID NO: 5795 - DNA, 762 bp, Zea mays
atgatctgagggatcaaatacaacagacacgcttcctaaatgtcgtttaccggtcagccactgctttaggaactcgcctgcagtctttttctggtgcgagagagagggttgcaggtgctggagcatttctacgtcctgtttcaaacaaaacccaggtacatatgtgaccaggagctggcaagctgtatagtttagataaattaaggttgccttgcaatatagctcatgatattttattgaaagcaatggtgtggcatcctataactataagtttccttttgttagattaagcattcactactgtatgacattgttttggacatgattgtttcataaactagataaagtcttgatacccttttaaagccaactgttcaaagagctgaataatattattcaaatattcagtgcatgaaagatgtgcacagcatgatagctttgtgtctagttattcttcagaaactttacccaccggaaccgaagaattattgcagccttcttaacaaatattccaatgcaggttgtgatgaaacaagcacagaatgtcgcacaggctgttgctagaagtcggtctgcattttcctcatggtcatgcatgggtgcacgtcgtcgaggtgtaggtgtagttactgcatgttctaaagatgatatgagagtggaaacccatgtaacatcaacagttgagtcaaagtctgtccttgtagaacattgtggcgccaagaccatagaagaactgcagtatactgcagctagtgtttctgt

SEQ ID NO: 5796 - DNA, 472 bp, Zea mays
ggggtacaattcataaacaggcaatagaggacaagccttccctttctagtgatcatatgtaaggatctgtccaatagattgtgtatatgaccgcgtaaaacattgttttgcatcgtagacagtactgtttatggagtgaaagtgagataggagagctgtccagatagcctaagctagctagcttcatattcttccaaattgaatagatatatatactccatgcagttggcctttccgtttcttggattagtaacatcgcaaacaaaatagattatgttcattctagagcttgtcaaatttgatctcaaattaagccaaacagttaaaccatctcctcagatccattaatctgattctttaccctacaatgcaccccccaaacaacacctgaacactgcaagtcctccaaacgcacaattggatctgtacatgattttttattatgatacctgtgttatactacaacatcaac

SEQ ID NO: 5797 - DNA, 373 bp, Zea mays
gactcttcctgaatctaccatttcttagttttagcctttggggtaaggtccgtaaggatttagtgtttctagacctaagttagtgactccagtaagggtttgtgggagcttatcaatcatttttttacttatccaaccgctacaaatagatggtgtagtgatttgtctgatcaagtttgcttttgtcctgttttgtataatcatatggtgattttggaggaaaaaaactgggatgttatttttcacatgttgcgggatggttgcagtaaaggtggttagattactttggaacaaatagttcaatgttgataagcattgggttttctcaagttatggtcctgaattaattctgattagtgttggagcacaggag

SEQ ID NO: 5798 - DNA, 391 bp, Zea mays
gcgcgcgcgcgtacgacctaggaagtagcacgcaggggtggcggcgcgtcatggcgtagtaggctccgggaaatggaatccgggaatggccggtagctcgggcttcggcggcagctcgacctccgggtacggcggcatttcgaccttgggcagcggtggcagctcgacctccgggaacggcggcatttcgacattgggcagcggcggcaagtcgtgctctggcactggcagctccggcacggtcaggtggggctccccctccttgggcgtcgcctcctcctccagccttcgcgccgcgctgctcacggcggcgcaggaaaggagcagcaggagagcgagggaggagtcgaggacgcggtggttctcgaggccatgttgatcgtaacgtaag

SEQ ID NO: 5799 - DNA, 394 bp, Zea mays
ccgatcccgtgcagcttcagcttcagcttcaccgagcgagtgtcacacacacacacacacacacccagctgaagctgaagcacatctccaagaaaagctttaaagctccagtgctccacacagcagctcgcggtggttcgcgcgccctacccaacatttccgaacacaacacaggcatcgtctgcgatgggcgccggcgacgacgacaccaagcccgctaccatggaggtgacctccacctcctcgccgccgtcgctcccctccccggcggcgccaccgccgtcgctgctgcgctccgtgctgctgtcgtacgcgtacgtggggatctggatgagcctgagcttctcggtgatcgtgtacaacaagtacatcctagacccgaagctgtacaaca

SEQ ID NO: 5800 - DNA, 364 bp, Zea mays
tcttatatgtgtgtttccattaacatggctgcaactaaccattgctgggttcaggccatccatacagattgtgctttggcccatgttctccatcgtggaggctggcgctgggcatcccactaacacaaaggggtcattcaccagaggcggatgagggatgtccatgaagccgttatccatcacagttgagacaatataacaatggtggaaaacaaaatgagataaaacaccagagatctcaaagaacaggggcctgatgatatttctgcccagacagctgcagggttcctgagggtctttcagacatggatcgtagaatagacaaaatggaagaatatcagcaggagtgtagtaccaaagcaaa

SEQ ID NO: 5801 - DNA, 643 bp, Zea mays
tgactgtaagtacatggttttacattttgttgtgcatgttttgagtactacatatattcttctaaaaaaatgaattgcataaagcctcaaagaatattatttggtgtagtggtgactggcttgatattagactattaacattaattttcttgaaagtcttatgtttgttgttgagagcataaataggagcaatgttacttgcttgtttcagctgctgattctttctacataccatgtaggccttttgagaaaaacaataaatggactgaagcaggacagatgtataacccccaagcttacattcatccatggagggaaagatgattcaacattgtttgagagctatctcattgaagagcaagatgttgatggatcgggcttaacaactggttcaggttttgtagccttccgtgagagcgtgaggaacgttgcaggagagatcatacaggaagaaattggaagttagttccagctcgattacctttttggttctgctgcagagggtatcgactaggatgttttagccttaattaatgccgtagcagttaactgaaacgtagatagccaaaatggagagacaattcaatgaataataaaaggaggccacttgatgtatagttgcttctgtcaacaactgctttag

SEQ ID NO: 5802 - DNA, 500 bp, Zea mays
cgttgatagccttctgaaccttgatggatcgcaggatgttggtagcaacatggacctctggagcttcgacgacatgcccatcgccggtgatttcttttgaggattttgaagcttggccataggagtatgtacatagggactaggggtaagcactgcctctgcagatttctctgaagttacatgccatctgcacagttgtgctgggctaatttttttttgttccaaaattccaaatgtttcaggaataaagaccgggggagattgggaagcacctgcttggcaccttgggggtagcatttgctcgtgtctagctcagagatgcagaagttgcattctgaaactacttggttatcgacctgttccctattttagctatctctttatgagagccatttatgagactgaaccattttgttttgctttcttttcgttgttacaatatatggtttaacattatgatttatggatatgtgccaaatatggtgctcaacagtggtcaa

SEQ ID NO: 5803 - DNA, 400 bp, Zea mays
  misc_feature (391)..(393): n is a, c, g, or t
aaggtgataataatgttgatatgcatctctggagggatcacactacctatcaacaaatgaccaggggtcaagcgtatgaccaatctcggagggacgatacttatcagcaaacatgcagcagaggaacagaaaagttcagcaggcacgcaggactgcaagctaggcagttccaaaccgagacacccgccagccatgtctggcaccaacaacaggggcaagtggcagaagagtttccacaccttgacatcataaacgatttgcttgaggaggaccagatcaacggcagtataccagagtcatttcatcaagattacaatgtgtttggcctgccattttcaccaagaggaaacgtgtcagatatgggaatggcttctgttagaagtcctgctcnnntcaattc

SEQ ID NO: 5804 - DNA, 606 bp, Zea mays
ttgtcaagattgatccaaactgctccattgattttccaaaagggatttcattttctacaggaatgtctgaaattataaggtactccctccgtcccacaatagagtttgttttatcacttgttttttatgtctatattcaaataaatggtaatgaatctagacacatatacaaaacacatacactaattattatatgaatccaataaaaggctaaaacgtattttaatttggaacagagggagtataacgcactaaccaacttaggtgtgcatgtgaatatttttctaatgcttactcaagttattatggtatggtatcagtttgaaacaatctcttattgtattctttgaactatttatacataatttctgccaagctatcttatgtgtgccaactttctgtattaataaactgatatttgactatccgagcaagtcactatctctgatattgttttctaggacaatgttaaattccagcttgttggaattgtcataaagaagcttgaactctatcaacccaactgtttgtgcgttgatcaatatatggagcctttgcctttctaaaacttattgtttcaaaacatatatggagacttgttttagt

SEQ ID NO: 5805 - DNA, 392 bp, Zea mays
attaacaattttaattgtcttagtctgttgctgatgtcttctttctatggcctaatactatttcccttttttgtatcgaactagagcaaaatagcacccctacttgttacggaatagactcctgtcagcatagcttcgccataatttgcatctatgcaaaaatgattgtttgtatgtttcaggaaagaaatttctaactttatttacttttatcaaaacaattagtataagtatcacaacgtactgaatgaaacatgctgcatttgccaagaacctgcaactttgaaagtgctaaggatatacccatgttcatttctgctaaaaattagcttcatatgcatcattgaaacttcataaatcaattaatcatctacaaccattcagcacaccct

SEQ ID NO: 5806 - DNA, 863 bp, Zea mays
  misc_feature (795)..(795): n is a, c, g, or t
  misc_feature (809)..(809): n is a, c, g, or t
  misc_feature (811)..(813): n is a, c, g, or t
  misc_feature (821)..(822): n is a, c, g, or t
  misc_feature (824)..(824): n is a, c, g, or t
  misc_feature (827)..(833): n is a, c, g, or t
  misc_feature (835)..(835): n is a, c, g, or t
aggtgtaagatcttgaagggcacactagctgttggttttgatgctgatgccaatggtgatgtatgtaaaaccccccaaagcccagtttagctgtaaatttctatctgtagatccaaaggtttacttgatttaatttgtttcttgcttacaggtcactgcagttaagctaaaggatggcacagtacttgaagccgatattgttgttgtcggtgttggaggcagaccattgactactctcttcaagggtcaagttgctgaggagaagggtggaatcaaggttactttgcttccgattcatcatttttcaactccgagcagatcaccgcagataatactagggttgttttaataaacatgtgttagtgatgatgctattttctcgttttccttgttaaaaggtgcatttacacatgcattattctcttttgtgagcaacagcattcaccttagtttttctccattttggtttcactccgtgtccctgtttcttcttttataataatactcaactaccaagctttttgttctgatttataccttaatatctgacatgcccaaaatttccatgcagactgacgcttcctttgaaacaagcgttcctggagtatatgccattggtgatgtggctaccttccctttgaagatgtacaatgagttgaggagagtggaacatgttgaccattctagaaagtctgcagagcaggctgtaaaggtgtggctatcctttgttatctattgacttcactcttccaatttagtgtctgtagttcgtaaagcctttaacctggatcaaanttcccttcaagcancnnntgaacttnngntgnnnnnnngngaaatgcatccccccccccccccccccc

SEQ ID NO: 5807 - DNA, 393 bp, Zea mays
tgctgctgaagcgctactctgctggatgacattggcattgaccttcctaaagctccagcacaattaggtatggagcactttggaacctagaattcttttcaccctttaggtcaccaaattgttttcatgaaaaccttggaagcaaacccatcaggttaggttatcttaggctcgcctgctgctgctgctgtaatagacgcttgcaacagccttttggaataatcttcctagcagctttggcctatcaacctttttagtttttgtatcttgcgaaagacggtctcgtgtattctctatagtttaggtgtagaggaattgaggaacagacaatttggagctgtataattttgcgagatcagatgagtgttgattgttattgtttcggccaagaag

SEQ ID NO: 5808 - DNA, 468 bp, Zea mays
ataagggttgcccctggatcacatgcaactgaagctgctggtatgcgttctatatttacagcttctgcaatagttaccattcctatcacttggctgaatatctcagctttttttttgtcagtgaataagcaactgaacgacaaagaacgtgttgcggctgcattggagaacccaaacctactggacatggtcgaagagtgcttatcaccaacatttgattgaggcctgaatatcaatatatcggtgtgacatggtgttgatgttcaggagccacacatgctcattgccaatggagttcactcctgtctttcgagaaccaaaatgccttgggtgttaagtgacgtgttgcatgatttttttcctccgccccgttcagttattatatatgctactatggcgctaccctttttggacgtttttggtgcttgtgacctcactgatcaatgcgagatgtaatcagctcttgtg

SEQ ID NO: 5809 - DNA, 383 bp, Zea mays
gagcaccttttggccacccttccaccacaatgccaacaaccagcgatacgaacgcacagacagcgagaattataagagttgtatcttgaagcgcttcccatacaaacacccagaaactacggacctcactttctgtgaacctgtttactccatatatgtcttgcctgcgcttaatgctatcatcggctgtgcttagcccatccgtcttcgaagttgcaagtttttccgcaattccatcaactccaccatgggtgatgagcttcttactatcatggccctcaacaatagaccccagctcgtcggcacagatctgaaaccctgcagccttgacttcctcagggacgacgtactcgcttcgaagggtgaggccatgtagaaactaa

SEQ ID NO: 5810 - DNA, 466 bp, Zea mays
ataaatttggtgaggtcggccgatatagagagtgcgagacttgggcttcagttcctggaactggtaaggaatctgaaatttgacttgccaaaagcgttcagccatatcttttgtctacttgcattttcatatcacctcaaatcgaattcatttggcaggtgatgagaggataccctgacagccagggcccaaagctcgtggagacagaggacggcattgaggccatggagaggttccagttccatgagaacgagatgatgaggaatatggcgaatggtttggttgataaatactttggcgaagactatggcctgtgagttgtgccgccgatacatctgggtaaacgcgtggagctatttgtgggtttgaaatgtaacgatcctggaacagaaggatgcgccgttcatcatggtttccatgcaatttagcccctaatatatagctggaaatgtgaatgtgttgaaat

SEQ ID NO: 5811 - DNA, 470 bp, Zea mays
tttcgactactctgatttgtaggttttggacacccgaggcggattgttgactgcgctgggctacggtctgtggccttcaatggttctcctctccgaaatcgtccagacattcatccttgcagatttctgctactactatgtgaagaggtacatatcacatatggtctagcatctattatcagtcgcgcgaaagcattgagcatcgactaacgagtcacttctggcggcacacgcagtgttttcggcgggcaactggtgctgcggcttccgtccggggtggtctgaaaaactgcagcgagatagaaaagcatactgttcgttccttctgtgttactagatcatacaaagcgacagtcattgtgctcctagcgcccaaacttttgcactcgtaaagtggattagcagagggccgttaaattttttttttcagttgtaaactgtttacgtgaatactgtaccaacaccgtgga

SEQ ID NO: 5812 - DNA, 672 bp, Zea mays
  misc_feature (664)..(668): n is a, c, g, or t
aaagctgtttcatctaaccgtacaaaggcaacaccgatccagtcctctaagcagggtgtgggagttgatgtgtgtgcaaggtgtcgtcaaggtttcttttgctccgatcatggtgagtttgtattcgcagtaatcttgttttagttaaactgactgattcctatttataagtaagtgttacacaatttaccaccctgcacatatgtttggccacacatatggtcctttatagtaatttggtaaaagatctttattagctgcctattaaaaatctgttaaatggagcttgctctggtgctatgttttcaggatcacagcccaagccgcaaaagccagctgctaccgacgattcaaacaaggaacctgttgagaaatccgctgttccaccgcccaagaaaaggatcgatgtaaatgagctgaggacatgtaaaaataaaggatgtggtaaatcctacaaggagaaggataaccatgattctgcatgtgactaccatccaggtcctgccgttttccatgacaggatgagaggggtatgtatatatttgaaggatttatttgaagctatatgttgatttctgcctctgtaaacaactattctcgccatccctaaaccccatatctgttctgttcttgcagtggaaatgctgtgatgttcatgtcaggnnnnntttt

SEQ ID NO: 5813 - DNA, 864 bp, Zea mays
aggcagcattctaccctatcagggagctattggacaatgagagaaacgggaggaaattagatgcgagtactcttacttctgtttctacggtacttggagttatacaggattgcatgttgttttctgaaaaatctatttaaaactccaactccacacacatggagctatacatgatgcatgctattttctgaaaatcgacttttagactcatggtcatggataacacacacgccatgcatccaccaggttgtggggctgccaaccagggcataaaatgcctttgtcgaagtttttttttttaaaaaacttagtgctaaactagaatacacgttcgcttctgatgactcaacaatgttttgctacaatctgttaacataatgatgttgattgttaccttggaatatgttgttgtatttgttggattcatggatacaattcagatagacttgttatttggacttcaggttatctgttctgtctgtagttaaaagtcatgccgtttatatttggatactggtgaagatgtaaagtttgataaggagtcccacattggtttttgcttcttctcttcctactgctgtttcagaaacctagacctttgagacaatcagacttggagagagccttatcaacatctagaaagtgcaagaaggctgcaagttcaggactgcagtcacccttgtgggttcggccgacagattcagaagacgatcaggtacagaacgcgatccttgagatatctaagctgatgtctcgaatagttgagagcagccagtcagaaccccaagagccttcttcaccttaatctaatccttttgctagatcgcgtgaaaattctacagcggagtaaacgcaggcattacg

SEQ ID NO: 5814 - DNA, 1380 bp, Zea mays
  misc_feature (647)..(648): n is a, c, g, or t
  misc_feature (743)..(743): n is a, c, g, or t
  misc_feature (845)..(847): n is a, c, g, or t
  misc_feature (1209)..(1211): n is a, c, g, or t
  misc_feature (1286)..(1287): n is a, c, g, or t
  misc_feature (1320)..(1322): n is a, c, g, or t
  misc_feature (1324)..(1324): n is a, c, g, or t
  misc_feature (1374)..(1374): n is a, c, g, or t
ccgcccgcaagcagaggcgccgcatcggtgagctcatcgccattttttagcctacctacaacatttcgcgtgcttgttgaattcaaactagctaataaacaggtcacttgtcctgcccattgcaattgcctcatccccatcgataatgaaccagtgcaaggtttagtttgttgcaatctagtatgtttggtttcgtattggcttgctaaataagttagttttaacactagtttgttcatcctttaaactgtaacaccagttggctgttccttgtttgtaccatgacaccacctagtattcaggcctggcggcctgcactagctaagcctggatagctcccaagccaccacctaccgggtgtccgggtgaatatgctaatcgggtttgctatgcttgtatctgatttgcagtgcattgttttccctttatgctatcgatgaagtaaccaaactaaaagttcacttgctttactcaacaattgctttcattgatttacttgttatgtatgatttcccccctattgcacctgctgacaagcgtataatttaccctgctatgttctctgtgcagcacgtcaaaagaaggctgtgaagatattcccacgaccaactgctggccctcttcgtcccattgttcaatgccagacnntcaagtacaacatgaagtcgagggctgggagaggatttacccttgaggagctgaaggtgatgcattgctttgccattgtctttccatttgagttntattgagccatgttgctttcttgaatgttctagtttgtttttattggtgttctggaacaatctgctgttgtgtgtatacaatttgtatggcacttgttaatnnntgtgtgaactgctctgctgatgtttggaattttttgtagtcaagtagttttccttccctattccgagtatcagcatggtgtttacgttttgtttcagatgtggcttgattggcataagttttctgttgatcctcattcagctaccttctgacaagccactcttttcatcgatgtatcgtgttacatccttggtgctgatgattagagttaatctcatcgattgcaggctgccggcattccaaagaagcttgccccaaccattggcatttctgtggatcaccgccgcaagaacaaatctctcgagggactgcaggccaatgtccagaggcttaagacgtacaaggccaagctggttatcttcnnnaaggcgtgctcgcaaggccaatgtatgtgtagaaatactttcctgaatgccttgtcccttgaagacgcctctctnnaagacatgctggttgttttgacttctaatcccnnntngcctaccttcaatgcaggccggcgactctactccggaggagctgccacgncaccca

SEQ ID NO: 5815 - DNA, 250 bp, Zea mays
acttgctgaagatgcttgcagagaagcagcagctaaaacctctggtcgagaaggccaaacagcaaaagtcagcaagcccgagcacgagttgatggtgaaatgtcaatagactggtagcttttgccgatgtcttctgagcgtcgtgttatcttatcagatacattgccaagttggcagctcagataagataaattatgaccgatgttatttataccatgttgcacgccgtgatgtgtcagcagctatgcca

SEQ ID NO: 5816 - DNA, 1161 bp, Zea mays
  misc_feature (60)..(61): n is a, c, g, or t
cgcgatctgtgtgcagcatttgagtggccacacaactccaaacgtgtcacatgagaatgnntttatggcatcatcacggttttcttcttgtggcaactcagcattgcctactcagaagagccttgttcctcaaacaaaggtttgatgccaccctcagctcattggcaggatagtttttcatgttctcttactgatgatgcattctgctatgatgcttctcatcagcctctcgcagaccctcagcaattagcagcaagcaggcctaaccagtcacaaggaacaaaaactgatagagcaagtgcacaagcatctgcaattaaaaatgaaggttcacgatccagatgcaataaagctaccattccccattcgagaaacaaaggttggaaatgatcttttgctcttccgcttcatgtagtatgtgacttcattcattgagaattgttaagttgctattcagttgtgttagttatctataactgggccagggaacttatgtaaagttaaagaatattccagtgaaactatgttaactatatatcaactggaagttcaaaatacagctctatgagagaaaatttacagtccatacttttgttctgttctaagcaaagtatattacagttttcagctttggaagagtccgattgaccctgtagttacatagcttcaggcatgcaaaaatggtatctcatcttttttagtttactgaggccctgtttgaatacactatagctaatagttagctgctaaaaatagctttagacatccaaacagcccaactaatacttcagctattagctatttttagcaaatcagctaatagttaaccaactactatttgttagctaggtaattctactagtaactttttagcagctaactattagctctagttcattcaaatatagcttggatggctcctgcaccactctgatgcctaggaaccatctaacgtaaaaaggatgtgttggagtattatcttactagtaattatgtgaaatttgttctccaggcagcaagaagacgcaacagcaacctaatggacgtgttcatgcgatcaagttcccagtagagtagcccattcgtaggtatgccccctattggctttactttcttgaactcggatcctgacataatgaacttatgctgatgattcacagg

SEQ ID NO: 5817 - DNA, 380 bp, Zea mays
cccgcgcaggacgccgcctgggtgtggttcggcaggtgtctcgccgccgccaacctgctctacttctccgccaacctcttcgtcttcctcatcccgaggttcctgccccgcgccttcgaaaagtacttccgcatgcgcgacgagctgtgcgccaagacggccgaggacaagcacgcgcgcgagggtgtcgtcggtgcggccaagtcggaggtgtcgtccaagaaggcggactgagagctatcggctctcgcagtcgcagactcgcagtcgcagggcggggtgtaatttaaattcggtagcctgtggtgggcctgctgtaatttctccctgcgttatgtttaattgtcatcggtttgaccaatagtcgttagtcggggggg

SEQ ID NO: 5818 - DNA, 864 bp, Zea mays
aagggagcgtacgagggaggaaggagaagaagcggatcaagcagcgcaaggactttatcatggtgaatgccctttgcattctctatagccgttactgttattaatgtaataaatatattatttgatttactgtcgatctttctgctacggtattctgttttatgctatgtaagcctagcttgattttcctttatgctggaaggggaatttttttcaccaataaaatcttgagagttgataggtagatgtcgcctagcagtcccaagtgtcaccatgaaacggatctgcacaataactttttatgccacccagtcaattccagcggtgctcagcagagtttaaaatcaaccttcttttgattcactattttacaatctcttcattttcctggacccaagcaagtgaatggcataacccaagcctggcatagagatacatgagtaaactgaaatatcgaccaaagcaactcagtcgatatggctgagtagtgttacctggatctgagctctacgtttctagttagagctgatgtatcgcccttatagtttctaatgaaacacttaaaatgcatgtgttacttgtacaggctgagaagaagaagcgcagagctcagtattctgctgctgttaagagaaaggaggcagaacgaacagaaaggaagatggctgctgtggcaagagagcgggcatgggcagcaaggttgatagagctaaaacagattgaggaagacgttaaagctgtaatggcataagggcctgctctggaaaatggcaaggcgtctaacctgtttctgctgctctattttctcctcctttgttcctacatagtttaaattgtcacaattctttgtgatggatgaaaaaa

SEQ ID NO: 5819 - DNA, 519 bp, Zea mays
tgattcgatcgatatccaggaactaataatccaccgacccccctcatggcggcttcgtcgcgaatgggcttatccgtctacctcgccatcatggcggcggtgctcgcctcggcgctcggagcggagctcaccgcggactactatagcgagacgtgcccgcaagcgctgaccaccatcaagctcctcgtcggcgccgccatcctgagggagcccaggatgggggcgtcgctggtccgcctccacttccacgattgcttcgtcaatgtgagcgagcgatcgacgaccgacgagctacctagctggccatgcatacatagcttcttgtacctagctagctaatcaagccaccccgccgccgccaccgcgccatgcatgccagtcatataaactgtaactgtaacctatactacgttgcagggctgcgacggctccatcctgctggacgacaccgacgacatggtcggcgagaagacggcgaagcctaacaacaactccgtgagaggctacgatgtcatagac

SEQ ID NO: 5820 - DNA, 810 bp, Zea mays
  misc_feature (800)..(801): n is a, c, g, or t
  misc_feature (804)..(805): n is a, c, g, or t
gcttccggtacggacgctctcgccaaatgcgtatctccatctcctgaatgtcgtgcgatcgatggctgtatcgaaattatttttgaactcagggagtggcaggccaacattggactggccgaggcggtggaagatcgcggtcggctcggccaagggcctcgcctatctgcacgaagactgtgagctctcggctctttcccctctgttcctctccgccggcgaaattttttgaatcttctgtccctgacaaaaacaggtttattattatttttgtttggtgtcaggtcatcctaagatcatccatcgtgacattaaggcggcgaacatccttctggattataactacgagccaaaggtagaccccagacagccgaaattctttttattcttgcgtgcctgccctgcatgcttgactgaaagatgcaaatcttttggcacaggttgcagattttgggttggccaaataccaagcagctgaagtaacctctgtttctacgcgtgtaatggggactttcgggtaaatcgtctctgtgatgttggcacgcccagcaattttccttgcccacatacatcatcataacgcatgaaccagtgcatttaatagtggcataagactcaagaatatgtcatgtcttttcttttcgtcttcagatacttggcgccagagtacgctgccacaggcaaagttaacgaccggtccgacgtcttctccttcggcgtgatgcttctggaactgatcactggaaggaaaccaatcatgacatcttcagagtatcagcctgagacattagtttcttggnnctnnggcca

SEQ ID NO: 5821 - DNA, 408 bp, Zea mays
ctgtgatggactggctccaacagacataggcccaagactaccagggctcaatcgaattcctctatcatgtgagagacgcatccttagtctaacatctggactaggaccaatttgcgttaatccagaagaacctaagggtgagtaatacatattgatagcattagcatcaccaatgcttccatagctgttaccaaaaccagcattaccagtatagctgccatggctaccaaagcttccataactactcccataagaaaaaggaacctttggagggtagacattattcaaaggtaggtatctgtttacacttccaacctatacaagtttcaagtatggggcataatggtttaagaaagattccatatggttattatttctaaaactcgacacagaaacaggaaatgagaa

SEQ ID NO: 5822 - DNA, 989 bp, Zea mays
  misc_feature (937)..(941): n is a, c, g, or t
tagcaggtaattgcagttctaattattttgatgctgcctatcattgtcagtgttatgttcttgtggggcttgggtgcattgctcacttatattaaagccttacatttgtacctcacgagtccaaatctatttgtcaatttctgcttgctctgataatatggtcattcttgctgttcttctgcattggtactgctgctcccaggattgtgtgcttggttttatcattggcaactaaatataattgtactgtactgactgggaaaagattcatattgcctgttttgggaagtggaagatatagatcatatgcagccaatgggagatatatcaaacggacctaaatccttttgtatgaactatcaactgtgataatgcgcaatgtgacaagcacatagctcaacctgctttccctatgtttattattgattgttatggtttctgccaaacaactaaattgctatcataattgtctaatcatcactcttttgggacactattgttttcattctaaaatttacatattttctccattgtgtcaattttttttcttatatattgaacaagttcttgtcagattgctgtaaagtgtgctatctggactaaagaactgacaaacttccattaccatttgactctgcaggagaacagctcgtcctaggtcacttcttacagttgatgagtccgtgaaacagcaacaacagtgcaaatcgctcctttccaatgggcaaagccacatgatactagcagatacaacattgaactgtgaatcatctttgaagattccagaagatatgttacaacaggattgtgaatccaataatgaatccttgcatgaaatgggtattaaggaccaggagtcagacatggatctacgtacaagcattgaagatgacaaattcattagcaatggaaatctacgtttaccaggttcactagnnnnncatgttcttgaagattatagagctccagattctgtattagaaggctct

SEQ ID NO: 5823 - DNA, 950 bp, Zea mays
gcgtcaacggcatacggggaactggagagcctgctactcaattcttggtaatggcaaaaagatttctatttgagtattaggcccgctcctgaaattaccgaaattcactctgaaatttcgctcaattatttttagagaaacaaacttcaagtatgactttctaaaattattagtccaaaacaaataaaaatatcatcagcatggtttatgaccatatacatctatatataatatattaggttaaagaatatacaatataaacaatacaaaatacgagtctagagttatgtatttccaataaaacactacactagtgtccacacggtgacacgggtgcagtgtgcatcagcattggataataataatattatggtgatatgtggtatatacatgtacgatcattactaaactcttgggtctgatccaattgagatcttgtttggttaatcccgttacccatagattgaatgtgattggaaaaaattaagaataagtttgacttgcttgtgatttaaacccatcaaatcccactcaatctatatgaattgagagctaaccgaataagccctgactatttacagggggtgaattttgtggtgctatggcatactatggagttgggacaaacctggtgagctatttgaccaaggcgcagaagaaaagcaatgtcgccgcagcgagcaacatcgcttcctggcagggaacatgctacctgactgccctcctcggagctttcctggcagattcatatctgggaaggcaccggacaatcgtggtgtccctaatggtagttaccatggtaggtgtagccgtgtagccatgttcttgcggtttctgtaatcagctgttgggccatgcatgcatggtttacactttacagttccctgcttgtggtggttgcagggagtgctcctactgacactttcagcatccataccagcaagcattca

SEQ ID NO: 5824 - DNA, 399 bp, Zea mays
caaggcatcaacatggccaggtttgagatcaattgctgtctgaaactcctggatagcacggtcatcctcccctactgcatgcagggccgacccaaggtcacagtgcgcatcagcatagtcttccttcaggaagatggcctcctccagtgccttctcagcagctcggtactccccaacgccaaagagagcgctccccaggagcttgagtgccctggcatgagatgggcacaatatggcggcttctcggtaatgctcacaggcaccaagtaccatcccttcggcctccatggcaataccaaggttgacatggatctgcgggaggatgtccgcggactgtgagccaccagcctccgcggcttcaagggcaaggaggtactcctccttggcttcagcatagag

SEQ ID NO: 5825 - DNA, 474 bp, Zea mays
  misc_feature (466)..(468): n is a, c, g, or t
gaaggaggctgagaagttaattaacatgaaaattcatccgatgactattattgcaggtattacttgctgaatgtgttctggttaatagtatgcttttccatccttcacattggaaagcttggtaactattgtagcatgccatgttactaggtcttgcttgcatcaatctcatagtaacaaatcaaatagatcaagcatacaatacaaggtatattgatggattctactgttaagtcattcaaaacttgagatgcggcttacttttttttttacaattcatgttttcagattgacctttcaattttcttagtaataaaaatgtataggcagtgcactgatgttctgattctaatctgtcttgtgttgcctgttttataccgagataactagtatgtattctggactctggagcactactaatattcattctagatcactgctttgtggtgagcttcaatgtcacgannnggttaa

SEQ ID NO: 5826 - DNA, 610 bp, Zea mays
gatgcctacgggggagctgcaccccctggtttccaggcgcccgcaccagcataccaagcgacgccctggaaccccactcacggtggtgcatggcatcaggacgcccttgcacactccttcaacactatgacgctcaatccaccgaacgctacttccgagtggtatgccgactccggtgcaggatcacacatgacctcggacgctggtaaactctctgctatttcctcgcccacttcattcactcctacatctatcattgtgggaaacggtgccttgcttcctgtcacagccactggatcacacactttttctttcccgcatcgcaatttagttctcaataatgtgctggtgtctcctaacattattaagaatttaatttccattcgtcgcttcaccaccgacaataattgctccattgaatttgatccctttggcctttctgtgaaggatttgcaaaccaggaacgtgatcgccaggtgcaatagctccggtgacctctacccgttccatgcaccctacaccagcacctctgcattactcgctgtacccacctccctgtggcatcgtcgtctcggtcaccttgggcatcaagccttgtccaaactcatta

SEQ ID NO: 5827 - DNA, 474 bp, Zea mays
  misc_feature (461)..(462): n is a, c, g, or t
  misc_feature (466)..(471): n is a, c, g, or t
cgcgaggacagtccccgacgccctgacctcggacgagatcgaccagctgctccaagcgaacagagagcccggggactacagcggctggtaagtaattaatgacggtaatttccctccccgatgctcgctcctgcagcagcagcagcaccaccagctctcactctctccgtttgtctttttttctgtcctcgaaagggctggcgcggaagcggagtggaagatcctgtacagtctcggcaaggacggggacggcctcctccgtaaggacgtcgcgaggagcgtctacgacgggactctgttccaccggctcgcgcccagatggaaatctcccgacagcggcagggagagaagctgataagcgtggtccgggagaactgaaccgagaggaccgtcctattgatgtcgtcttgcgctgggctgctctgaactgaacaagtctggacatgccgtcaagcgacatnngggnnnnnnctc

SEQ ID NO: 5828 - DNA, 371 bp, Zea mays
tcgcgccctccccgaccatggtctcggcggataccatccgtacggctatcggcgtcatcggtgagtcccctggtcgtccatttcattattgttgtcaactttgactaacagcatacgccgtacgcatgcatggcgagcatatcctccggccgatcacgcgcggtggcgcctgctgttttacatgtctttttttttcttccacgttctcctcctcagtttgctgttttactatcaccgttgattttttaaatttttttaactattcctcttgtttaaaaaataatgagttatcatattttttatttattttattatttaaggtaatttgttcttaacttaaaattttacatttttgaattaatattttaaat

SEQ ID NO: 5829 - DNA, 925 bp, Zea mays
tagagattactgtgtctcctttttttgattcatggttaccttttgaaaccttatactggttattgttgcacaggatgtttgcttagcttcttttacattatttgcagaaaggcggtggcaccattgatcttgaaccacgccttagtcacacatcagctgtggagcctacacttgctccagttgcggttgagcgcacaatgacgacaagagctgcagcttccgtaattttctttcaatctttgtttttcctcaatgacttcactcctgattgataaatgtttatttatttcacagcagatttcataaaagcaatgtttcctctattcaaaactaagaattttccaatatggttgatgcagaatgcattgcgacaacaaagatttgtccgtgaagtgacaatacagtacaacctctgcaacgagccatggtgcctttctgtcctgcatcctaagatctcttgattgtattagttcactaaggcttatccagtaccagtattgtcatctctagtttatttttcagtctgtgttggtgaaatatgctcttagttgtttgcttgtataaattagtctcctgtttagttacaagctatttttattgacttttttttgtatgttctgacaccttccttcaggttaaaatatagtataagcattgtggcagacaagggattgaaaaagtcactttatacttctgctagactgaagaaaggagaagtaatatatttggagacacattttaataggtatggacgtttgctactacttctttagttctgatgatatgttcttgcttccagtttgtgcttgcatggaactcactgctcactgttctttcaattttgttacaagtctccacaggtacgagctgtgcttcagtggagagaagcctcggggtatggatcgagctctaatgcatctgatgc

SEQ ID NO: 5830 - DNA, 764 bp, Zea mays
tatcaaaatctatcaacttcgtgcacacacggagaaatcttgttgaaaatgaccgtgttttgctgaaccgtgcacatcgtgctcaacaagaatatgaaaggtacattgcgttttatttattttttaggtcaattgcagtagttatactgaatctggccagaaactgcttcaacacgaaagagatattgtctacattttttttactctgtttatttcagttggaatatttgttctatctggtcaaatgaatgtgttttcagaacacgtactgatatggcatgtctttgtgtagagtggccaactattgtcttaaattagctggcgaacaagaaaagctggtgagtgaaagatggcttccggagctgagaaatgcagttcaagaagctcggaggtgttttgatgactgccagcgtgttaggggcttggtaagccaatactagctttggtttaaattcctgtggctatgcctttgtttgtccaccctttcatggcgtcaaacagtatgttacatagcaacaactccattggttagatctgttgcagtcttgtaactcttgttatggtaaaacctgttagtcctgtgaccagtgaactcatgcttctatgttatttgcaacttccaggttgatgagtggtacgagcagccagcagccacaattgtcgattgggtaacgatagatggacagagcgtgggtgcctggatcaacctcgtgaagcaactccacatggagatctccagacggacgctggcaatgtcatctgta

SEQ ID NO: 5831 - DNA, 360 bp, Zea mays
tttactattggcttatagaaaaatctatgaggactgaacaaccttttcccttttaagtcggttcccttttctgcggtttagccgaagctccctttcgcacagcttcggattgatggagccttcgtcacaattaagctcttcatcgtgtatgcttttatcataaatccgaagatacctgtccataaagcatacttggaagacattgttaaattaagtttttgaggaccttcggaggacgaaggcccccaacattagtggactcctcaacggggactaggccttcgagggctgaacctcagtaaaacaaatcacccgtgtcccttgtgtttattgcttgtgatttgtttgttctctcccttt

SEQ ID NO: 5832 - DNA, 811 bp, Zea mays
agggtatcgatgatgaagcaacaacaacaagagacaaatgcattggatcaacttgaactgggtactgtgaggactttactctatggggccattgctggttgctgtgctgaagctgctacatacccatttgaagtggtccgtaggcagctacagatgcaagtaaaagcaaccagaatgaatgcgcttgcaacatgccttaagattgtcgaccaaggtggggtaccagcactgtatgccggtctaatccccagcttgttacaggtatgtattctttcagcagagaacctacttccacatatatgtaggggccaggttagcatccatagtattttaagaagtcttcagaggtatactctagacctaccaaatttcacttgaagtatatcatcgattgcttcaagcttatggtcgaagtaaaacatcagctgaatacgaatctgttcatataacttttgtatgctaacttgctaagcagtaaatagtatgcatgcatatacttcgactaattattggtcacattcatgacgtgtgacttttttgaatcctaagctatgaagatagtgtatatacttcatttgttaatgtatcaagttagcaataaggaaacatatttaaagaaagtgataaaaggttcttgacatatccctgcagtgatgctggtttacttaaagagactgagattagcagactgcatgaacttagagatctgcatgtatcattttgatcctactattcagtgtgataagtgtatgctagtctgtttcagattgccttaagtttctggttttctttctacttttgtttaggttct

SEQ ID NO: 5833 - DNA, 1006 bp, Zea mays
cgctgccctgaccttgaggtactgggtttcttgattttggtgtaattttttttacatttcaaatggtatataactcctaaaccaaataaaatgatgattgcttgtcagccactttaaactcctttgatgttgagcaactacacaaacacaatataaataaaattgttacataagccgtattcatgagttattctgggttatgtcttggcactttctttattcattatacccaataactgtacaactgggaacttgtgttttttcctgtatttctggcataagcaagccggatttgttttaaaatcattaaaaaaactggaactcagctttcccagatattggatatttttttgcagctagattacaatgaaagtctcgttccccagaaattacattcctatgaaagcaagcatgcattgatctcacttctctttgtgccgcattaggataaacttttttgtgacttatattatctagaagtgtaaattatgttttgtggaatctttgttcttccttgggagattgccttcacaccaaccctttcatgttgcacattgtggttttttgttggtgagcatcctaccttatttttttacttgtataagtcgtgatgtggctttatgtgtgtactaggcatatgcaaaggaaattgatgaacacaagagaacaatactccttgttaacaaggctgatctgttgccgttaaatatcaggtctgaatgttgtttatttgacttgattgtatagtcattattgtcttagtagtgacgtcatttcacatatgtttaatgcaggaagagatgggctgattattttaaggcacatgacattctctatgtgttctggtcggctaaggctgccactgccacattagaaggcaaaaagttaagtggatactctgaaggagaatctgcttcacttgatttggataccaagatatagaaagagatgaactcttgatgaagctgcaagctgaggcagaatctatgtagctcagaggaggtct

SEQ ID NO: 5834 - DNA, 407 bp, Zea mays
cgcaggtacgaagaaggcgacgaacatggcgaggctggccttggtagcggcggtggttctgtgccttctattagcgacagggccgcagggggccgtcagcgccgaggggatggtgtcatttgacaatttgatcagctgcaaggtactgggcaactgcgataagaacctgggccccgaggcctcccgcccagggaaacccgccaacgactacacccgcggctgcaacccgatcaccggctgtcgcggctgatcatatctctctggtcgatgtgcgcgcaatgtcaatgtcgcacgcgcgtgcaggtaccaggccttagcgtgtggtgccgcgtgtgtgtgtatatattacacacatgcattatacattggtcgtcgatcgttactgtatgcatggcaactgatgttta

SEQ ID NO: 5835 - DNA, 783 bp, Zea mays
  misc_feature (777)..(779): n is a, c, g, or t
tgcttttgttgatgattcagtttactcaacaaaaatagaaaagcttaactgtaaaaggcagaggatttctggggataaagatagcgacagagccagttcaagtaaccagtataagaatggttctggttgtgataaagaagtcgaggattcacggaagcttttcctcgatgctaaaaaatgtctttatttattaaagagaacgttggaagatctgcaaaagaaggatttgttcccttacaaccccaagcctcttcttagaaggtcagtcgtatgaccatgggttttgtatgttgtctggtacttgagtaaaatcattttcttgttcctgcatttgcctcttctattattcttttggcatatcaactccatggcattgtcaatttaaatgattgaactggaaattttagcatatcaactcaatggcattgtcaaccttatgattgaattggaaatcttggcatatcaaatcaatggcattgtcaacctaaagactgaattggagtttttggcatatcaactgccaggcagacatggcagctaacaaaattgtggtagattataactcatgtttgcttgaaactgaaccttaatttctcgcttggacagacagacatgttattttatcatatgttcatatgaatcatgctgttatgcctatagtttgttcttgtagcttggcccggttccaggagctgggtgagcaggggtgaaattcgagttaaacctgctgaggaagctactatctgtagaagttgaagaatgacccttgggcagaannngttg

SEQ ID NO: 5836 - DNA, 636 bp, Zea mays
ctgatgggcagaaacaaggcgaaggaagcaccccaattcaggaggtaatgaccgactccgacctggatactaagaccttgttcgtttacatcggattgcacccggaatcgttccggttaatcaaagtttatataaattagagaagcaatccggctcggaatcgttccgacccaccaatccgacgtaaacgaacaaggccttaataatttggtttccgtatggttagtggtttctcattccacacctctgcttctccgcatcctggcaggattgaagtcatggtgacatgggctgggtcatccattgtctgagttaggtttgccagttttcgtgggggtgcaggaaagagctagagccttgttgccgcagaactccccctctatggatcgcatgcctagtatcgcgagtttttatgtatccttactgtggatgctaacaagattcttgcttatttttgcagtagatggtactgagaacagaatcagatgttgtaaactatacatacagtcgtgcatgttgccgaatggaccattgtttcggtcgtagcgcttgtgtcggtgcctgactgcagtctgcagagcgagatgtcgccctgccgcctatccttttctcggagtgctttattacaagtttgag

SEQ ID NO: 5837 - DNA, 380 bp, Zea mays
tgggctaccggcccatgctcacgctcaaaatggacggcccgctgtatgttcgggcatcgctccggcaatgaggtgtgggcgactgggcggcggccacgaagtcaaaatacgttgcgtactgttatgatactatcttagatattaaacttgttaaaataaatattttattttatcttagctaaaagactgaaaataatacgagttgaagagaaactcaacctttttgttatagctcgctcgatctctcgtcatctttcaactagcgaaatggtattatatgaaagtgttgtactatgtatacgtgtgacttcctttcgtattagacctcggtagtatctggtagcccatctatgatgtaatgattgattaataagcgagaa

SEQ ID NO: 5838 - DNA, 431 bp, Zea mays
acacttgcactccacactatgcatacggtcatggagcatgcagctcatctgcattgcttttgccatagctacaaaaatttcagcacaactgaacccttcagaagcttttgctgtagctacaaaaatgtcagcacaactgaacccttttcctcagaagagacctggatcaagaatgtccactcaagcaaaagcctgtaagatgatgagcatggaaagcatatggtcacttattttaatcatcaccattggctagcactaacaaaataaacattcagttcatcagagagttgaaccacacagtcactcggtcctccatgtccaccctggtgggtgctgatccctgcagatggacattccattaccagacatacccgaagcacaaatgaacatgcctttggagtagcatacaaaggaacagccatagagccact

SEQ ID NO: 5839 - DNA, 387 bp, Zea mays
ggcgaagcggaattgattgcgaccaccaccaccacgtcttctccacctccgtccgatccgtcgtcaccaagccaccatcattggcgccaccgcgccgcccgcccgcgggagcccagctgcgcattcttaactgtttctctcttggcttctcggcgaagtgttgcggttgcgggggtactggagtgcggagagcagcgcggcggtacgtgtgcgttgctgcgctgtgcttccacagtgagctaggggagagcgagggggaggaagcaccacccaccacaccacctccattaaaggcgctcacgcgccgcccctccgcctccacgagaaagcgaggcgggagcgagtgagcaggggcgtacgtccgtcgtcaaggccatctctctcctc

SEQ ID NO: 5840 - DNA, 372 bp, Zea mays
tcttgcagatttctcctgaaactgttgaaagtggccatactagtcggaggcggggagcacgtgaaggaagagcttatcaggaggatcagcttccagttgcacaaagctactgttaaggatctcttattacctgccacttcgcctaatgatggtacctatgatgttcggctggtgcataatcttgtccagagatttgttgcaagaacagcgctgtctcataatggcggtttcattgagaagtccgacgaaaagatgattgagctcaacttcgagcaagaatccattttgtcggtaggagagcttgttgatggctacctgtctgaagtagcttcggatcaagacctttcgttgtctatgtttgttgaactggcg

SEQ ID NO: 5841 - DNA, 461 bp, Zea mays
tcttcctgcagatatgttgtaacgattcaaagtcccatgctttgcaaaaacccgtaagtgctagcattctcctaggcgatacatttgtaggacccaaactaactatctttgttgtgcttgcaggttattccaggaagaaaaacgaaccctctccatccactgcaatgagttgcctgctagagcggaatccagcgcggaggatgactcgcttccaaaagaagctcagatttccatcatccccgatcaggatgagctacatgatttcccagcctatgctacttgatttgcctccaataattatgtttgatgtagaaaaaaaaacaccattttggaggcgcaggggcaactgagcaacactatgtattaactatctcgtagatactacagcagaggctccttgtaaagcaggttgagacgatcattctgcagttcttattatataggatgattacgaaggtaac

SEQ ID NO: 5842 - DNA, 371 bp, Zea mays
aattgctcccacatcatcgagtcgagatacagggagcatccccaaatcagtcaaacaagacgcatgaagaatacattttcttttattttccgagaaaattcaaacccaaccagtgcgccaagcatatgcgatggcatgcagatacgccgcgattattgctgcaactgctactaggtatcatgatgcgacggggtggtggccattgaggaagtcgaggaggagctcgttgacccgatccgggagctgctcctgcacgaagtggcccccctccgggatgtaggtaatcttcaggtccggcatgaagttgtccatggcgccgctgcgcacggcggtctcgaaccccgggaacttgaagcagtagtccttctctc

SEQ ID NO: 5843 - DNA, 698 bp, Zea mays
caggtaccgtccccgttccttttttttgtactctgatactctgacttaaaccagcaagttggttaattctgtgcgaagttactgataaaattcattatgtaaacgccaatgttcttatgtggtgaccgtcaactctggtgccgcgacccaggcttggctcatatatttctggaggagggctaagaccaacaacgtggaagaagatattgccgaggagcgattgcacatgtggatcgatcgacacggccagcaaccaacgtcacatgacgctgtggatggtataatttcttttcttctgactgcttttcttgtagtatgcttgtggctgttaccacagtaccacactgaacatcgaagaagccacgacggtgattgctggccgtgaaaatcagtccggagatgacttatataccttgggcattgttctcgcagttgagcaaggcatacacgagctgaggaagcttggcatcgagcagctcctgtgggagctctcccgccacgaggcgaaccttgccaaagacagtccgtctgatgtcgaggacctgacctaacagtaacagcctgagcggacgacggtgaccatctcccacccaaatgcagtccaggctccaaccatatatttgtatatcatacagaaaactgggacatgtaaacattttttgtggttttggttttttcagctttgtcacaaacagttc

SEQ ID NO: 5844 - DNA, 546 bp, Zea mays
gctgaacagccccatattgctcatcaccaggaactgatgtcgctgttaaatcaatcaacgaacttgcagcctatttacatcataatctaagcacgccacggagtttggcaacttttttcatcttcggttgatctttagaaacggagaggccacagccacacaatgtttgcatatttgcaccgtccaggtccagccatgactagtcacagaaacttggatattacacgacaggatgtccagaaggctgcagttgctgcttgcacaatcgcaggattctggtagatactgtgcatggacaacagggaattagtatgcgcaagttacacgactacagcaatactatttaacacctgcaggtttaatggaatttggaaacttatcgctacatgactatatctccctagacgatgatacaataattcaagtgcttgcaaaatgaaatgtgggggagatgctcacgatgtaaataccattacaatctaagtttctgggaatcaaatctccctaaattcagaaactgttacagtctaagttcctgaataggcg

SEQ ID NO: 5845 - DNA, 482 bp, Zea mays
tagcaacttagcataaccacctacaatcctacattgatttccactcagaagtctatattatcttttgattctgaactttttcctctccgtatcaccagattccagagctggctgcttctcttatggcaatctgtgaagtatttgggtgtctttctccaagtgtttcctggacactgagaactggagaggaaatatctgctcacacagtcttctcgaatgcatttattcttctgttgagactttggaagtttaaccatccaccacttgagtattgcataatgggagatggtgctccagttggctcgcagctaactcctgagtatcttctgctgttacggaattcccaggtcctatcttccagcagtttgtcaaaacaacgaaacggacaaaggcaatcacaagtatcaacttcacacccatcatctggaaatcctatttttatggactcgtttcccaagttgaagttatggtaccagcaaaaa

SEQ ID NO: 5846 - DNA, 277 bp, Zea mays
tcggttggggtggtatttatagcctccacaccccaaactagccgttggacagaaagcagcaactttctgtcgtcgggtgcaccggacagtccggtgcaccacccgacaactactgtggagtgtccggtgcacgccacgtcagccgatcgttggcagctgtagcagtcgaccgttggatccgaccgttgccgtctgtccggtgcacaccacacaggtactgtgcactgtccggtgcgtcaccaggcgctggctgacagccctcttctcaggtttcttt

SEQ ID NO: 5847 - DNA, 720 bp, Zea mays
ctggggtaagctctactatactgggtagtgagcgtcaatccttttattacctttctagtcaatacaaaatttcatagctgaacaaccctttttaagaacttttatggatgtgtgtcatctagctgtggctgtgtttattttattgccatggtaggtcttccagttagtcatttcaccatttgatgctaatgtctcagcacctggaattaaagcaataatcgggggctggcaagttcttttgtttactcctgaacaagctacatgatcattgttccctggctgatggctttgttaactccaagttggtttctggtccttgcaggtgccatttcagaatgctatgaagagtccgtcgttcttcagcaggatgcgttggtctatcatgcttgcactcgtggagagtggagacggctctagcgatgccatttcagccgcaaagtgaactgatttaaccgaatgtgtgacatcttccaaaatactggttgcgtgtacttaacttgtggagcgcttgaaacatactagtgtaccaggctgcctgtgttgagacattttacttgtacacatggtcggttttcgttcttcctcgcttgcgtatcggtatcgcacaccaacttgaaattgaaagtcgtcaacgttcttctagttcatacggtcaggaccctgagtttgcatcaatcaacagctaaaaaagggccatatgctagcgatgcaagtttgaat

SEQ ID NO: 5848 - DNA, 799 bp, Zea mays
ttggccccttccttgatggttttttgactaaccaaaacgtctttgcttttaattatacatcacaagttgtggtgagttgcaaaacatctttggtgcacatatccctacagtttccatcacactctaagttttctcttattttgtgtgcagtttttcattgtgttgtcatgcctgatatcagtctcagtgaacttcagcacttttcttgtgattggaaagacgtctcctgttacttaccaagtcctgggccatcttaaaacatgccttgttcttacctttggttatgttttgcttcatgatccatttagctggagaaacatacttgggatcctaattgcagtagttggaatggtcttatattcatacttctgcacagtggagacccagcataagaacactgaagtctccccacagcaggtacctttctcatgcactggagaaatttcagtgtgaaccattaaattcttctgccctttcattggcagtggcccagtgtgtaaatatgttatacgagtacggagtacccaatactgaaagtgtgctattgtagtggtgaacattgaatttttctaattttttctctctctaaatttttacaattacctgtacatggaacaaactaggctctacgttcttttactgtaaaaatgggacaatatagcttttgagcaaaattttgacatgtactattaacgtatgtattattacagatccatctgttcctgtctcttgtttgtaatcgccaactgtttttcatatgttgcaggtgaaagaaagtgaggcagcccctttgatctca

SEQ ID NO: 5849 - DNA, 439 bp, Zea mays
acgatgtacttcctgaacatgacgggcatcagcgtcggcggctacctgctgcccatcgacccggcggtgttcgccatcaacgacacggacggcacgggcgggaccatcatcgactccggcaccaccatcacgtacctcgcggagccagcgtatgacgctgtccgcgcggccttcgcgtcgcagatcacgctgcccttgctcaacgttacggatgcctcggttctggacacgtgcttccagtggccgccgccgccgcgccaatcggtgacgctgccgcagcttgtgctccacttcgacggggcggactgggagctccctctgcagaactacatgctggtggatcccagcacagggggcggcttgtgcctggccatggcgtcgtcttccgacggctccatcatcggcagctaccagcaccagaacttcaacgtgctctacg

SEQ ID NO: 5850 - DNA, 390 bp, Zea mays
tctgtgtgatctaggtatgatgacaacgtcgaacggagctgagcgagaggagcacgagtggagaaggatcttcctagcagctggatttcgtgactacaaaatcacagacactcgaggtatcccgtcaatcatcgaggtctatccatagtgagaattgagagagagagagagagagagagcatcttatcctatcctttatacgtataaatccttattaattgcaataaagctcaattattctcagccttccataccatctcaagttgcagtagtactagctagccatcagattatgtcgttgtatcatcatcatcatcaagccattcattgtcgatcctctatctgatatgcgtcgatgtttgcactgttggaatacggtctgaattctga

SEQ ID NO: 5851 - DNA, 641 bp, Zea mays
gatggaaagtgttcagacagctcttcagaatcaaacaaccaagaggcttctgattattatcgctttggatggttgctctttttagtcctaagaatccaaacattcagcagattcaaggatcttgtgacatctacgaatgaactagtttctgtgttggtaagaacgtctgctatgatcttcgcaagtgttttctcttcgtttgcagcaagacaattgatgtatactgttagttaacttgaaagtaatggatactgcttattttgcatgcctgcaggctgtacttatcattcatattcctgtgcggctaaggaatttcgatataaaggattcatcctactttggtaatggcaaccaatacgtatttgacagatgatgtttgctaatcatggtctgctagttatagcagtcgtggcataaaactcatgtgtccatttattggtttgaatcaggtaagaaatcagataggggagtcagtcttattgcttctttgtgtgaaaaatatcatacctcagaagatgagttgagcaaagcactggagaagacaaatactctcatactggatattttgaaaaagaagccatggacagctacttcagcatgccaacaggataatttgactttcattgatcccaagaagggta

SEQ ID NO: 5852 - DNA, 361 bp, Zea mays
tctcgaatcatgtcattgtcagtaaagtaccctaaagcacgatttgggtcagaccagcccggtgcgaacataactagcgaccagcacggtaggccacgagcaagatctaaacacgatctgtcagtataatcgtgccaggctgaccccacgacatttaaattacaaaaataaactaaaatgagcgcagatattggtttagctccaaacatacattgatacccacctaactacactccattccacggacatcgtcaaccaaccagctctagatcccacacaggatcagaaaccttgcatggtcggcagcagcaggtgctctaccaaaacacgagcagcaacacgagatttgctgctagcaaac

SEQ ID NO: 5853 - DNA, 332 bp, Zea mays
tgcatcatgacagcaaatgaataaggataaaggagttcactatattaagtaccatttggtgcataatgaggaagggcaaagagtaaagacttgcctctataacgaggtctacatctttgaaacgttcataatcaaggacaccagtaacgagagacatagccttctcatatcgctcctcggtcatttttcctttctttactcgactctgcaaattggctggggaaacaaaatagtaagtttacctaatataatcgaactgattgaaatatcaaaagattttcctaagaataagaaggatttaagatggacaacgaccaatatgcaagcagtca

SEQ ID NO: 5854 - DNA, 396 bp, Zea mays
cgaacgaagcggctcgtgaaggactgtgataaggagagcgaggcggtgaagactatgcagggtaaactgctgctgaagcggatgtcagtggtgcaggacgtggcggatgccgtcatggctctgggagacgtcaccgatggcaagggtttgctcgggagctccacgctgatggcagcagctggactgctctcggcgttgatcagcacgcataagaattggaattcttgttgaagcctggaggtacatgttatagatagcacatcatataatgaaataaagctctgattatagcgataactaagagtttcctctggaaatatggatgctcctaaaactgataccaggtcctctggggaatgaatgaagtttattcttattcatttggttggaccaagg

SEQ ID NO: 5855 - DNA, 436 bp, Zea mays
cgctgcgagcccgagcagcggcggcggcaatggattcgtcgctttttctctgcgagcccgaccagaatgagttttgttaggatcaaaccatctcatctcagcagcaatgacactatagcatggcatgacagttacctctcgggtaccttgctgtcccttagtagcggtgcgttggaagttgaggtgctcaagctcaaggaggtctttcagttgcttggtcgcgcccgtgacgcagatgtgcgggtgtatccaggtgctcgacgtcgcaaccagatagttcaagggacgctccacgtagtcccttggctgcatctgcatctgcatctgctttgcctgtgacctcctcctagttcttggatgcagctcgttgtgctgcttgcttgctctgcgtcggcttctgctttcggctgcttttggcgtcctaatagtttgtagt

SEQ ID NO: 5856 - DNA, 515 bp, Zea mays
ctgctgtcgcccatggccagcgccctgctcaggtgatggatctcgcgctccctgtgccacacctccagccacttcttccactagcgcgcagcacccctcctccctgctctctatttggcgcaggaacccccatggtgccttgaaatggttggcgtcctccacttggccagaaatctcctcatccatactcgctgcctttcctcgcgggtcgcgtgcagcgagcatcccttgccgacgtcctccctcgcctcgccagccgagctccttcttggccgagctctcctcatgcccgtcgcgcctattcccatccagatctcgtgccctttctccagtgcagcagcactgctgcggggtttccttgtcgcgctcgtcgtcggcctccaaccgggtgtgcgtagccctatccgtgacgccatcgaaacccgtggtgagaaaacccccgctgcccttgctgctattatttttgtgctcggtaaaactgttgaactgttgtgtgtgtctaattcgcagctaac

SEQ ID NO: 5857 - DNA, 1016 bp, Zea mays
  misc_feature (948)..(953): n is a, c, g, or t
  misc_feature (965)..(966): n is a, c, g, or t
ccattccttctgtagttagtttcttatttctcaagctactcgtgactgactactgaggcattacctaagctagttttcttcctttcatgataaatatcatgtacacagtcaattgatgtatttattgttctggttgcccaaatgatttaattgctgtgagcttgttgccacagcttactttatccacagtaaaaatgtcagcaactacatatgacagctatacaatctatgcttgttgcctgtcaaccatgctcatttacaggactatactaccagattttctcatgtgttagctaatgaaatcccctcgtcatgtcctacctcttaagcgtaaaatatcccatgttacttaaatcatggttgcacaattctcatctatatgaaggcaaaataactaggtataagcataatttatcttcaaatgttcttctgtggttgtactttctattaggaggcccttataaatcctcaaatatacaggttgattaactttgctatgtatgaagcataaacattttagttatccagcctttttagaaggctcaaatatttgacgttgttatatatgaaatatgaactttgtagttattcttctataagcccaacctgtggtggccaaatggcatgggaaagcaatccttatacaacgttgagattagtgtggatgtaaaagggtttggagaatctgattcctggagccattattttggattccgcaagattgagagtacaattgatgattctacgggtgggaggtattaatgaaatgcccaaaatgtgtctattcgatatttgatatcttgaaaacatattgatgcaaatgtaaatcatgtccaggatcttcaaggtaaatggtgaacctatttttatccgaggagggaactggatattgtcagatggccttcttagattaacaaagaagcgatatatgaccgacatcaagttccnnnnnnacatgaacttcnnatatgcttagatgttggggtggtgggctagcagagaggcctgactttatc

SEQ ID NO: 5858 - DNA, 444 bp, Zea mays
actttattcaacttctatattctagatgattgcccataagagaatggtgacacttatttgatctcttgctattcttttttcagatgtgaagaccaagtgggagaacagctcatggggcaagaagctgattgtccagaagaggagagcatcgctcaatgactttgataggttcaaagtcatgctggcgaagattaaggtcaggaaccttcctgtcaaatgtctagttcctgttgacagtgtctatattgctggctcacactttctttttcttttatgtgaacagaggggcggtgctatcaggcaagagctcgccaagctgaagaaggcgtccacggcttaaggagtctctttccgtgaatgtcatgttagagtttttggttatgagttggatcagcaattcgattgagcgttgtcaaagccagaattaccaatatgttccctgta

SEQ ID NO: 5859 - DNA, 390 bp, Zea mays
ccgtcaaggacctacgattccctcaccgacgaattcagctacgcgctgcttctaatcacgatcgcagtcctggttgctgccatcatcgtcacatggatttggtccgagaagaaggagttgggggacaagtggaggtgagcgaggtctcaaagttgttacgcggaagaaaatttcgggccccagtcagctagctcccttgttttggtcccccccttttttcattttagtggtagagttcacttcacctttgactataggcattttatttatgtaaccattcgacaagaagaaagcctatctactgtgaatcgacacactgccgaagcagccacctgtgcagctgaaaatttctggagatggcatcaaaggatattagcagagcgcagataa

SEQ ID NO: 5860 - DNA, 562 bp, Zea mays
gaacaccagactgttattgaaggaatgggagaactgcatcttgatatcattgtagacagactaaagagggagttcaaggttagtattctgactagctgcatttatgcagttgcatgcgctgtatgtttctttaattctattctatatagaaatttattattcggtcattagctgttgtcgagtcagagttttgtacctgtcacattacctttacttcttttatgcaaacgatctgtgcaggttgaagcaaacgttggagctccacaagtcaactaccgtgaaagtatttccaaagttgcggaaatacaatatgtccacaaaaagcaatctggtggatctgggcagtttgcagacattattgtgcgttttgaacctttggaagctggaagtgggtatgagttcaagagtgaaatcaagggaggggcagtgcccaaagaatatgtaccaggggtgatgaaaggattggaagaaagcttacccaatggtgtcctcgccggttacccagttgtggacttccgggctgtgctggttgatggctcatatcacgatgtcgattcaagaa

SEQ ID NO: 5861 - DNA, 285 bp, Zea mays
gaaaagtgcaatcaatttacttgttgttatagcgctatcaaaggttgtgattcctttttattatagtttgttgaacacacatagtactgacttcaggctgagcaaaacattttaagggattgttttgctatattgtattccatgactttgtcattctatatcaagtgatttcaatggctgcatgcagtctttcatatttgaacacacttgctatttttcacagaaccatgtagtttgttgaattaactcaaaaattgagatgttgctgtcatttgcttacacttt

SEQ ID NO: 5862 - DNA, 360 bp, Zea mays
cacgcgtgtctggagagtcttgtggaggctctgaagcaggccaaggaggatgctgctgctgctgctgctgctaaggcactagctgacgctagggcggccaaggaggaagcggaggaggcgaaggagaaagaggccaaagagaaagacgaggcaacaaatggcaaaggagcagcagacccagcagggaaggacactaagatgagcaatggagatgttactgtcaataaggaaggtgatgacgagtgacaagtatagaatggagacgagctcgctcgcttgctagtgaagtaatggagaaacatggctataaataatgacaccagtggcctatgtaaaatagtgtagtctctagtgaagatt

SEQ ID NO: 5863 - DNA, 397 bp, Zea mays
gccccctatggctcagctcagctcagccaactgctggagtggtagtggttgcttcctctctcttctcacgtcaccatgatcgataagactagctagaatataggtggctggcagtggcagtggcagtggcagcgctatcctatatagtgccccccggccggtgtgctcgcgtcgggagctagccttggaagaagaagcagagagcagagacgccgttgcgtagagggaggaggagtgcttcttcgttcgtcgttgcccaaaggccaaagcagcagcagtcacttggaattggaccagagcggcgcgcgctgccgagtgccggccggccggccgacctctgtttgtagcggcggcagcaccagctctcaactgctcaagcaaaccaattaaagcagcc

SEQ ID NO: 5864 - DNA, 488 bp, Zea mays
ggcttcttgttccacccagattctcaaggtacgaaaacctcttggttgcaaccggcgagatcttcgtcagcttcgggccgacgaagtcagctagcgccggcgaaaccggctccattctccccgtcttctctacctcggccttagcgtctgagacgaccttgtcggtgtcgtccgaagctaaactggcggcgattctcatcgattccgtgttcctgagatctcgagcggccaagtccgcgctcagaacgtcctcgatccgagacatgaccgtgaaagccaggctctccagagtcctggagtagctctccaaaatggcaaggccaacatcctgacgaatacaagggagggaggtacgcaaggcattcgaatgaacaaacaaagcaacaaatggcgtatatctgacgaggcatcccagtcccatacataccttgttgcattggatcttgcttatgtccagcgccgactgggcaatgccaggaaacctgtgc

SEQ ID NO: 5865 - DNA, 385 bp, Zea mays
ccaaagctggcggtgcagttcaccgggtgcgcgcggctggagccaccggcgaagagctacgtgatcgacgtgaaaccgggcgtgaagtgcatcggcttgcaggagggcgagtggcccggcgtgtcggtcatcggcaacatcatgcagcaagagcacctctgggaattcgacctcaagaacatggaggtcaggttcatgcagtcgacctgcacccggtgatcgtaaagctgacctcgatggttttgttgatcagagcatttgaagggaaatgttttttctgaacataaaaaaatagaaaacgaaaatgatgctctgcataaatcaactttctgcacgagatacatattgatattctgcgcgatttgctatccttgcatcgaaccta

SEQ ID NO: 5866 - DNA, 360 bp, Zea mays
ctgctcttcgttactcataacagatcaaactcgggactccccattcttcttcgttcagcttcttcccacgctcggcagcagctgagctcatcggcaatggagccgccgccagtcccggcgctggtcctcgcaatcgacgagttcgcggccaacatcgaaggtgtgtgccagccagaggagtccgtagagagggagtctccccagcgtcgtccggtgtttgctgctgtcccttcactggccgatgtttgcatgttcctcaatccgccgtcgatgggcaggcgagagcggcgaggaggacgccgaggagagcaaggacagtcgcgtgcctaccagcagcgccatggcgcgcgcggtagagtc

SEQ ID NO: 5867 - DNA, 467 bp, Zea mays
acctgataccctctaattacgagctgattataccactacacgtgtttcatatttgagcatacgaaacccttatttttctgcagaatatcagaccaagtgccgataacttgcccgaggagctgtcagaaatcctaacatcctgctggaaggaagacccaaacgacagaccaaacttcacacagataatacagatgctcctacactacctatccaccctttcgccacaagagaccttggcgggcccccgccgcacgttcagttcggagaacacaatcctgcccccagagtctcccgggacaagctcgctgatggcttcgcggggcgacctcggcgacacgcccaagggcaagaaggaagacaagccgaggggcttcttcttctgtttcagcgagtgctattagcacgagccccccccaaagggggaacactccgagaagcttgcaaatactgaacgaacaccgtctctc

SEQ ID NO: 5868 - DNA, 350 bp, Zea mays
agtggggcgtgaggtgctgaagttggaggccgagctcctccagcagcagcaggaagaaaggcgagatcggcagcgccaacccacaggagaggtaggagacgaagagcacgaactccccggcggcgagatcgccgaggggagaggcgccggcgcggatccttccggcgaacgccggcgcgctccatccgagcaggttgcgcaccaggttgagtgccacctcggactggaagcgctcgggatggactagcgaggccatggcaactacggcggcggaaagcagaggagcgcaaatgcaatggggcgcggagagctcgaaggcgaaagggcgcaacagttggaaagaatgcgaa

SEQ ID NO: 5869 - DNA, 375 bp, Zea mays
agttgctggtatcaacgtttcattcatgctggtccagatgttggatctgaagtcaagtaatttcctgttcccaattcccctttacacatatctgcggatttcacattttgttgtttgaactgtcatatttatgcaggtgttccatcttctaagtatggaattcgtttccttgaattgcttggacgtgatgagaacgcctttgaccacctgtactgtgtggcctttcggttgcttgatgctcagtggcttgtgaaacgtgcctcctatatggaattcaatgttagcatattgagtacattgatccttctctttctgttttaagacactggcattcttaatttcttacttctttggctttgttgtaccaggaggtct

SEQ ID NO: 5870 - DNA, 374 bp, Zea mays
cctgtggagaagctttcttgctatgtttctgatgatggaggggctctcctgacttttgaagccatggctgaagctgctagctttgctaatatgtgggttcctttctgtcgcaagcacaacattgagcctcgcaatcctgacagctacttcaatcttaagaaggacccatacaagaacaaggttcgccaggattttgtcaaggacaggaggagggtcaagagggagtatgacgagttcaaggtcaggatcaatggtctgcctgactcgatacgccgacgctctgatgcgtaccatgccagagaggaaatcaaggctatgaagaggcagcgtgaggccgctcttgatgatgcagtggagcctgttaagatccctaa

SEQ ID NO: 5871 - DNA, 564 bp, Zea mays
tgcaatctgattctctctaagaatagagccaccaatgtaactagtatcaagcttaaaggtgttgcggtgagttttcagtcaactaaattgaaacttgtaatttggtaaatttctcatcaatggtaacactgtaaacttcatcagattggaaatgcagacttggatgataatttgactctaagagcatcatatgactactattggatgcatgctatgatttcgggaaaagcttataaagccgtcaaggataagtgcggctttaatgggacatacactgaagactgccaaaatgccatggacttagccacccaagaaaaaggaaatattgatgactatgacatctatgcaccaatatgccaagatgcctcaaacccttctaaatcaagtgactcggtatacaacatcgtacataaatttcacagattgacagatgttttaacttccatttctatatgaaattttggtatactggaactttttgtttactatttcagttagtgtttggtgatccatgcacaaaccactacgtctcctcttacctaaatcgtcctgaggtccaaaaaa

SEQ ID NO: 5872 - DNA, 517 bp, Zea mays
tcctgattccttgctcggcttgcgtggcccatggattcgatgtcatatcatgtgttgtttgctcacccgcctggtcgcagttcgtgtcggatggcgtgttcttcgcggagctgaatgagatgctcgcggaggacggctactccggcgtcgaggtccgcgtcacccccatgtgcatcgagatcatcatccgtgccacccgcgcccagaacatactcggtattggcgcttgtacaacccccattccattacagaggtgattactttggttttctagtgttttggacttttggttgctgaaactgtttttcttcttcatattccttaagcgagaagggccggaggatcagagagctggcttctgtgattcagaagcgctttaacttatcagagggtggcgttgagctctacgcagagaagctgaacaaccgcgggctctgcgacattgcccaggccgagtcgctccgctacaagcttctcggtgaactcgccgtgagaaggttatgctcttgaccgtaaa

SEQ ID NO: 5873 - DNA, 1203 bp, Zea mays
  misc_feature (384)..(385): n is a, c, g, or t
  misc_feature (387)..(387): n is a, c, g, or t
  misc_feature (389)..(389): n is a, c, g, or t
  misc_feature (393)..(398): n is a, c, g, or t
  misc_feature (412)..(416): n is a, c, g, or t
  misc_feature (426)..(428): n is a, c, g, or t
  misc_feature (430)..(431): n is a, c, g, or t
  misc_feature (434)..(439): n is a, c, g, or t
  misc_feature (441)..(441): n is a, c, g, or t
  misc_feature (458)..(459): n is a, c, g, or t
  misc_feature (462)..(462): n is a, c, g, or t
  misc_feature (471)..(471): n is a, c, g, or t
  misc_feature (473)..(478): n is a, c, g, or t
  misc_feature (482)..(483): n is a, c, g, or t
  misc_feature (486)..(490): n is a, c, g, or t
  misc_feature (497)..(501): n is a, c, g, or t
  misc_feature (503)..(507): n is a, c, g, or t
  misc_feature (509)..(509): n is a, c, g, or t
  misc_feature (511)..(515): n is a, c, g, or t
  misc_feature (518)..(518): n is a, c, g, or t
  misc_feature (530)..(543): n is a, c, g, or t
  misc_feature (550)..(553): n is a, c, g, or t
  misc_feature (557)..(558): n is a, c, g, or t
  misc_feature (562)..(565): n is a, c, g, or t
  misc_feature (570)..(574): n is a, c, g, or t
  misc_feature (576)..(576): n is a, c, g, or t
  misc_feature (579)..(581): n is a, c, g, or t
  misc_feature (584)..(587): n is a, c, g, or t
  misc_feature (589)..(591): n is a, c, g, or t
  misc_feature (593)..(594): n is a, c, g, or t
  misc_feature (596)..(604): n is a, c, g, or t
  misc_feature (606)..(615): n is a, c, g, or t
  misc_feature (617)..(632): n is a, c, g, or t
  misc_feature (636)..(641): n is a, c, g, or t
  misc_feature (643)..(647): n is a, c, g, or t
  misc_feature (649)..(653): n is a, c, g, or t
  misc_feature (655)..(655): n is a, c, g, or t
  misc_feature (665)..(669): n is a, c, g, or t
  misc_feature (671)..(680): n is a, c, g, or t
  misc_feature (682)..(695): n is a, c, g, or t
  misc_feature (701)..(703): n is a, c, g, or t
  misc_feature (705)..(709): n is a, c, g, or t
  misc_feature (718)..(720): n is a, c, g, or t
  misc_feature (724)..(730): n is a, c, g, or t
  misc_feature (732)..(737): n is a, c, g, or t
  misc_feature (745)..(747): n is a, c, g, or t
  misc_feature (751)..(751): n is a, c, g, or t
  misc_feature (753)..(776): n is a, c, g, or t
  misc_feature (778)..(780): n is a, c, g, or t
  misc_feature (783)..(783): n is a, c, g, or t
  misc_feature (785)..(788): n is a, c, g, or t
  misc_feature (800)..(803): n is a, c, g, or t
  misc_feature (807)..(815): n is a, c, g, or t
  misc_feature (821)..(831): n is a, c, g, or t
  misc_feature (833)..(837): n is a, c, g, or t
  misc_feature (839)..(843): n is a, c, g, or t
  misc_feature (846)..(867): n is a, c, g, or t
  misc_feature (871)..(886): n is a, c, g, or t
  misc_feature (888)..(892): n is a, c, g, or t
  misc_feature (903)..(920): n is a, c, g, or t
  misc_feature (922)..(923): n is a, c, g, or t
  misc_feature (925)..(940): n is a, c, g, or t
  misc_feature (945)..(947): n is a, c, g, or t
  misc_feature (949)..(954): n is a, c, g, or t
  misc_feature (956)..(963): n is a, c, g, or t
  misc_feature (965)..(965): n is a, c, g, or t
  misc_feature (968)..(974): n is a, c, g, or t
  misc_feature (983)..(988): n is a, c, g, or t
  misc_feature (996)..(999): n is a, c, g, or t
  misc_feature (1001)..(1026): n is a, c, g, or t
  misc_feature (1029)..(1032): n is a, c, g, or t
  misc_feature (1038)..(1047): n is a, c, g, or t
  misc_feature (1058)..(1075): n is a, c, g, or t
  misc_feature (1081)..(1085): n is a, c, g, or t
  misc_feature (1087)..(1099): n is a, c, g, or t
  misc_feature (1101)..(1110): n is a, c, g, or t
  misc_feature (1112)..(1113): n is a, c, g, or t
  misc_feature (1119)..(1119): n is a, c, g, or t
  misc_feature (1121)..(1122): n is a, c, g, or t
  misc_feature (1125)..(1134): n is a, c, g, or t
  misc_feature (1136)..(1150): n is a, c, g, or t
  misc_feature (1160)..(1163): n is a, c, g, or t
  misc_feature (1166)..(1168): n is a, c, g, or t
  misc_feature (1171)..(1173): n is a, c, g, or t
  misc_feature (1175)..(1185): n is a, c, g, or t
  misc_feature (1193)..(1200): n is a, c, g, or t
aaaacgtagtacaaatcaaaacattgcatcaaattaaatctttgcatgctaataggattgtaatgaatttggaagaggggattggacaatagtgtttagtttgactgcttgggtgtctcatctcacatatacaaagtacatattgtaatatggagggtgaagtagagagccagagtggattttgtagtcgctggctcaggagtgcccgacagcggagcaggtcctccatgtgctcgacctcggtagacaggaagaggtgtggagtaggcccagtggaggtcctccctcgccatccgcgcaccaacctcgtcgtccggtggataaatcatgtctccacattgtaaactccaaatgcatggcaatcatatttgcctgcaaagattnnantncatnnnnnnggcaccacagatgnnnnntactgattannngnnccnnnnnntngatgtaaatccttcatnnttncgaccccantnnnnnnattnnaannnnngtgagcnnnnntnnnnncncnnnnntcncgtgactgtgcnnnnnnnnnnnnnncattccnnnnaccnntctnnnntgccnnnnntnccnnncgnnnnannncnngnnnnnnnnnannnnnnnnnnannnnnnnnnnnnnnnncttnnnnnntnnnnnannnnngntttccccctnnnnncnnnnnnnnnngnnnnnnnnnnnnnnctacannnannnnnctcccaacnnncgtnnnnnnncnnnnnngccccctnnncctncnnnnnnnnnnnnnnnnnnnnnnnnannnctnannnncccaatcccccnnnnccgnnnnnnnnncccctnnnnnnnnnnncnnnnnannnnnttnnnnnnnnnnnnnnnnnnnnnncgannnnnnnnnnnnnnnntnnnnncacacctccannnnnnnnnnnnnnnnnncnncnnnnnnnnnnnnnnnnctctnnnannnnnntnnnnnnnncnctnnnnnnncccaccctnnnnnnctcacccnnnntnnnnnnnnnnnnnnnnnnnnnnnnnnacnnnncctccnnnnnnnnnnccccccccctnnnnnnnnnnnnnnnnnntttacnnnnncnnnnnnnnnnnnntnnnnnnnnnnannaccccngnnccnnnnnnnnnnannnnnnnnnnnnnnntcctttcttnnnnccnnnccnnncnnnnnnnnnnncccccctnnnnnnnnccc

SEQ ID NO: 5874 - DNA, 773 bp, Zea mays
aagagcacatgtggttactgaacaccacttggttgaacagctctggccttggcccacctactgtttgcgccatgtagccgccgccgtcctcctggagatatatatcgtgcagactaatcacgatcacgatacagtcgatactctggagctgaaccctggacgacggccatgtggtacagtggtagagggcaaggaaacagaaggcagacctgcgggaaagagatgctggcgccgccgccgccgccatcgccgtggagctcgtcgtaggaccggggggaggaggcagaggcggtggcgtgcgtactgtccgcgatagcctcgaatggaggtctgctcagggcagagctaggaggcatcccaagcgcctcgtggtggagctggagcatcccttcgattttctgaaacgcgtggattgcaatgtttcctgtgattcgtgaacggcatggcgacagacaggggatggaagagacagttggggcgcggggcgcagaggttgtgagatgttgcgtacttgagtagtatggtcatcagtgctgaaagcgtcagtagtgtccaagccaaagccatacagcagcacagggctcagtgaagcgatcttcatggaaaggaactgcaatgcaacggacgcgcccaagaagcaagcggactttccagttagttacagctttctaatctcaacatgtgtcgtcgtctaatctagcaatttatttatttatttgctcagtgtatctatcactatcacctcgacttggttctgcaaggactgcacgtag

SEQ ID NO: 5875 - DNA, 595 bp, Zea mays
tggcccttgttgaacagaaggttcatacacgatgaagcagaattttactaatctcgacatccacgtgggccagtcttactcatttctggtcactatggatcagaacgcaagcagtgattattacatcgtggccagtgctaggtttgtgaacgaatcgctttggaccagagtcaccggtgttgcaattttgcaatattcaaattcaaagggaaaagcatctggtcctcttcctgatccaccaaatgatgagtatgacaaaactttttcaatgaaccaggcacgttccatcaggttcgtagaaaagaaagaaactttcttcatggtcattgactatttcaagtgacagcaggcttgccttttcaatgcaatcttactgaaaacattgattcacccgtcatgtcctggcacttggtatctgcttctttgcctcttttcttgaaagggcgggcgctatagtgtttttaatttttataacaccctttttggctatatctaattacactttgttagtactgctgtgtatacaagcaatatagctctttctagttgttgtctcattgcttttctctatcttgtaatatagttcatgtgcatc

SEQ ID NO: 5876 - DNA, 504 bp, Zea mays
cgtctctgctcctttttgcctgactgtgctttgtttgcctgctcgcgaatagaaatggattgactgtgctttgtttggaaaaaaaaatgcagcccggtgttcagccacctggcggggaagacgtcggtgtggaaggccatctcgccggaggtgctgcaggcgtccttcaacaccactccggagatggagaagctgttccgctccaagaggctcgactcggagatctttttcgcgcctcccagctccaactgaagcaccagctctccaagacgggggagaggagatcgttctcgattgtcgtcaaggtcatggttattaataattaagttagtgtcgtcgtcttaagttagcgtcgcgtcgtcgtcttaagttagcgtcgtcgaagtcagggtagagcgagaggtagaggtcgtctgtcatccgccattgaactggaactgctttttcaagatgaatactacccctctttcttaatcatcgttattactgctgcgaaagttgtgt

SEQ ID NO: 5877 - DNA, 260 bp, Zea mays
cttgacctattctatcctgcagtttcctctttgtgcatctgtgtgaggcctatctcgggattctcccccatttcggcctctggaagtatctgtatcattgtcggcccgggatggctgggggacagcaccatctcgttggcggcgccagtctggagctgcgtcgcgggaggaaaatagagtacctcgacatccccctcaaggatagcatcaaggggtggcgcctcgagtggttcattgtggagaaccactgcaagtccctc

SEQ ID NO: 5878 - DNA, 368 bp, Zea mays
gagctgtgctggtgaatggtgctgtcaagcgaccggctcagcagtttctgtcaccttcaagcaacaaggagaatgtgccaccagtgggagctttgagggctacaccaaagaggaggacccccttgcctgactggtacccgaggacaccactccgtgacatcacatcaatcgtcaaggtggtggactatttccttgctattttatgcgttcttctctgaaagcgttgcacaccatcaccatttctgctaatgtctaattccattttgttgtatttggtgcatgcactgtactctataatatgctacagtgcggtgcaatgtttcatttgtcagtccttgtgttcagaatgcctggttagtggccaacaa

SEQ ID NO: 5879 - DNA, 777 bp, Zea mays
catgcatatcctgactaggactaggattacaattgtcatagcttttatgctgagctacagctaggaggcacttgctctccgcattttcttaacatttgctctttgtagttccaagtttgttcgttgatgaaaagtgaaagtgcgtaatatattattaaaaaaacgatgataacttacatcttttattgcaaccctgtatataaccaagttttagggctatagtattagaaacgtcgcatgccatggaccagcggaagttggttgtaaacttgtgctagatgtttctgtacattcaatggttgaggagaaatgcagccttatatgatatctaagtgtcacgagttgcaagctcgatggttgtcatggttaactattgtgcactttgaagtctccttcaaacttctccataatcaattggatttgtttcctctgaattatggagccaatgtttatgctgatgttcatggtatacatgagctatctctgttctgctgttccattttgctcacttattattttcattgttgtggacttgtggtatgatgatccagtactgttccatgattgtgtactaattgttgtgtgaaatcaatatctcgttatctttttgaattcaggtgcaccgcaaactctgattcagagctgcctgacctttgggactttctcgtacatcatagagacgctaaacaagcagcagcccgcactggcgctaccactggctacagagattaaggatcaaaaggctggacaaagtgttcttcctcccttcacgctccc

SEQ ID NO: 5880 - DNA, 383 bp, Zea mays
tatggcagccgagtttgccagcgctttctcaagtcggcgccgcttcttctccgcctgcttctggcggtccagctcgtccttggcctgcttcttttttcctttcttcaacactttgcctgcctgattgctgctcatggtagccctgtccatgacagccgtgcctgctgctattcactattacctctggtagacctgactcctctactcactactaggtataattagggaagaaagaaaacaaaatgttcaaacttcattctttggcctcattggtttgtctaacttttttttattttaataacgaggaagaaaaggaaaggaactgttgctaagatgggtgggtgagtgcaggatgctgctacacccactcaggtctgaatgag

SEQ ID NO: 5881 - DNA, 422 bp, Zea mays
cgcttatgtcagcgatgtcccaaaaggcaagcgtgttggggtgcattgaagcaattgagaatgcatcctgatcaaaaatgtaacctgagtagtgtactagcatcactggactcgatatattgtttcaccgcttctgactactactgttgttggttcgttgagcctgaggaatcaggtggaggagaggatcgaggcgtaggaaggagaaaccctaatcgtcaccgtcgattcctgtacttcttctgtagacataaaaaactcaggccacagggaagtcaagtgctcgaaactcgaaaggcaaggaaattcatacaatgacaaaaacaatagcctaatctgctgccatttactatcatacacgtgtgccccaatattactcatttactcccatcttttgttttcgtatataatgcgggattgtc

SEQ ID NO: 5882 - DNA, 382 bp, Zea mays
gcgctcctgccaatttcggcacgaagaggaacgctgactcgaacgatttcctccctctgaagctcaggaaactaagcggggctatttagtggctgatttatgaaaaatatctggccgaccgttttttgatatgcataagaagcacaagtatgctgttacctgaaacagcatgcagtaatacttaaccacgttagggcttcagaaggctggagatggacgcatttggtggtggcaaccattgtaaattgtacgtttgctcccaaatcgttgcatttggcatcctctgacccactggcctgcatgtttgtatattttttgtgtgatatacggggagatgtcttgtgccacgtttcctccgtggcgtgtacattcaaacaaattg

SEQ ID NO: 5883 - DNA, 365 bp, Zea mays
  misc_feature (357)..(358): n is a, c, g, or t
gctgtgctcacatgcgtctggtcgaattcaggcccaacctttgagaggccaaaatcagaaaccttggccaagagattttcatcgagtagtatgtttgctgacttgacgtcacggtgtatgattgactgggcaaaaccggtgtgaaggtagtggagccctcttgctgctcctacgcagatttccagtcttttcttccagctgagaggcggcatatcaccgccataaagatggctcttcagagttcctttctccatgtattcatacaccaagatcatctcgttgtgttcatcacagtaaccaatgagcgacacgagatgacggtgtcgcagccctgacagcaattcaatctctgtacgnnactccct

SEQ ID NO: 5884 - DNA, 761 bp, Zea mays
tttccgggtcccgacagtgccggatagaatcggtccaccactccccgtaccccgaactacctgacctgagagagagaccgtgcctccctcgccgccgccgccgcagcatccctagtcggagaagatggccgagaagccggcaggtcccaccccgaggacgaggatccgaggcggtctcgcggcctcagctccctcctccaggtctcccttcccttgatctgcatttgcaccgccgtttcgtttgaatctttttgaactcgctccagctgttcgtttcgcattctctgatgcaggaggctgtcttccgtatctttcaccgcggccccgagcaagatcaagaaggtgcggttccactcatgcctttcgaaatacctgcaactttgctctggtctttttagcttttgggatcagttgtttgttttgttgggtagtaagtggggttcctgtgatcgatgtttcaatctttttttgtttgtttcgtctttcgtgtaccagtagtgtcatagaagctggtgtgactgggcacgggacactgcattaatgaagtagagcggggaatatcttttaatagtgaacattggcggttaccagaaatgcaccatgcgactgtggagtactaaacatctctatgtgcaggttcctgaccctccaaaggccgtgaggccatcaagagccacacctgccaagaagcggccacaagtggatcaagctcagaagcggagagaagaggtcgctgctctgcaggagcagcttaatggcct

SEQ ID NO: 5885 - DNA, 375 bp, Zea mays
caatgtttaccagtactttaaagagaagaacacagcactaccaaatgctgaagtaattcacacaaacagatcaaaagctagtcttacaaaaccatcggtagttacacatcttgatcggtcgacggactccacaaatgacacggtacgaagtctttgcggcaaatcatcagcattccgatccaggtcaatcgacgagtcagcgattctgttgctagaacctctcccacgccttctattgctgaagaagggtaacgagcaccaaaaaatacaaatacacgcatgcggcatgccatcatacctttcctactctagatgcattagtgcagtatttcatgcaaaacatgaaccattaacttgcaagcctacgtgggtaaa

SEQ ID NO: 5886 - DNA, 828 bp, Zea mays
ggaaaaggtgtctgaacatgttagtagtcggtcagaaaaagattgtattgcaagatttataaggctaccttttggagaacagttcatgggacacaaggaggatagaatgaggtttgagaatactgatgacaatactgatgagcctggagcaaatgtctcaaaacgactacgtctcactccactagcagatgcaagcaatccaattatggctcaggtctgtattgttgctttttactctgatgttggtggttgctagagtacttttaagcaatatgccatttgattgggtgggcctaggagctaagatggcagcaccaatacaaattctttttgtgattagaacttttgagtcgtcgcctgtatataagaatgtcacatgtcaaccgccctttctacagtgtccttgttattagatgtataggtcacttcctcaagtagcctttgttccttgcatatataacccatattctttacctcagaacaaaaggataatatttaaacaatttctggcatgacattctcaaaactgatccctgacttaggtgtgcagtgtgcacacaaatgtcttacattggcctgctggtggaaggcatgtttcattagcttccttgtactgtattgttgttcacttcggatgtttggaataactgagtgagaaatctgagtaactgaaaatgttttcccaggttgcatttttatcagccattgtgggttccgatgttgcctcagctgcagcgcaagcagctatttctgcccaatcccgtgttgaccttaatgacggcgagattgaaacttcaataaatagcatcaagcaagaaaaatcatctc

SEQ ID NO: 5887 - DNA, 645 bp, Zea mays
gtccaagaagatgtagcttctcattccgttcttttgccctagtaacggtggatgagatccttaagtgcacccggattcttcgcaaagtgattgatctcagcctgcggggaaaaatgcccaaatgatggagtataaaatattttcgtacataatatttaaaactaaaacgataaaaaaagagattaaacatgctaaaaaagaaaattaaagaatgctgaccttccgtattgctatagcagttgtgacaagtttatcaccaattaactcatgcaaaaccttatctgcagaaagcgattctacagattcctgcaggttctgcggtagccttttcagttttgaagagtgatcagaagggtttgattctacaaagaacacgaatcacataagatacttgcatactgtggtaattatgtttattcattcagtaccgagcgcttatcacttatctggttgttaggattgtttccaaatattaccagcaaggcataaattttggaaacaataaccaaaaggaaaggactggcataaaggaattcataccaattggctcaggcaacttaaggtgtcttcttagcccatcgatgccagcagctacgatagcagcaagacccaagtgtggattcgcgcaaccatcaaaggatttga

SEQ ID NO: 5888 - DNA, 374 bp, Zea mays
  misc_feature (366)..(369): n is a, c, g, or t
tcgagaaaattcctcgtcctaaatgagcttgtgcctatagctggttttgatgatgcttcagtcttagtgaaagataagcacgtgaataacaacggaggaaaatgttctgcagcacattagggcgttggggaagctctttttttttggtcacatgggtagcaaatactgggtagaactgctcgcttaagcatggaccaacgagaatccaatgagatggtgatgcaacattggtcttgtttgggcagactgctgcttactacttccagtgtcatgccagcgaggagatgagatggtccatgggtgctgtgtggctgaattcccagcccataaagccaagtccctctctgatacttggaggtcttgctnnnnatgtg

SEQ ID NO: 5889 - DNA, 422 bp, Zea mays
ggggggacaaggtcccaggtgacgtcaaggggaaagtcgagtcgaagctgcaagagctcaaggatgctgttgctggtggctccacgcagacgatgaaggacgccatgagtgcgttgaaccaggaagtcatgcagatcgggcaggccctctacagccagcagggtgccccaggcgcaggacctggtgcagctgatgcttcttctgctggttcagcgggcacttctgagaagccaggtgacggaggcgatgtgattgacgcagattttactgacagcaaatgagggggcatgctaggtattagatggaggcggtttgccgtgggagctgttttgccgcgagggagataatttgtttccacaagattgtctaggatgtggatgttctactttttggtagattggcacctaactgtggaatgaata

SEQ ID NO: 5890 - DNA, 865 bp, Zea mays
attaagtaatccatttgttgtcgtaagtgatctcgatcttgatccgcataaaaataggttattttattagttcttacattgtctcgatctttatctccttttctatgattctgtcacttttgtaggtgttcaaatctaaatatcatggtattttatgtctcgatttgtagtagtgtatggtcgcaattgtggtattaattggttgatgggcgtgtttagatttttgactttgttttcgtgtttttgtgagggaagtgattagggtaggaaatgatgtctgaaagtgacgagcacggctcgctcctagacaagatcaacgagaagatccacgagtacaagcactcatcgtcgtcttcctcgtcagactcagatgatgacaagaagtccaaaaagtctaagaagaagaagaagctctttgggaggaaacatccattgcatcacgttcttggaggaggcaaaggtacacatgagttaggaatggagaaattcgagaatttttgctgtcatatatctattttctttacagaaaaaaaaacgaggtacactaagtcttttgaaacatggattgacaaaataaaccatatattgctttgtgtagtttatgagctccttttgtttccttaacttttgttaatctataaggcgtgtaacagccacggatgacaataatggcatctaatattccttttgatttagccgccgatcttgtgctgtggaggaacaaacaggcatccgggagcatcttggcaggggtgactgtgatctggctgctgtttgagggcatcggctaccacctcctcaccttcctctgccacgcactgattgtgtttctcaccgtctggttcgtctggtctaatgttgcgtc

SEQ ID NO: 5891 - DNA, 455 bp, Zea mays
gtgatgctgctggcgctgtcaagcgtactggcgacgagccgttctggtgagtgtttatttaccttgtatataatataatcagtgtctactacgtactactagtacgtttaaaccgtgttgtctgtggcagtgacttcatgaaagtagcacggaggctcaccatagtcgagagcaccgaggggaggctgcagaaacgtctcgtcgagtacatggcttgattgcatgactgttcgataaggcactctgaagcttgaggaagactgaagcttggagcgaagtaactgctatgttttcgtttgcgtttgtctgccgtgaagcggaatcgcgatgtctgtctcgtcgtgtgaaagaaactcgtgtatcggatgttcgtctgtcgtcgtgacttagaactctgtcgtggtcagttgtcttgcgcttgcgcttgggtcgaagttgataaatggcctctttgt

SEQ ID NO: 5892 - DNA, 730 bp, Zea mays
tacttcgtcggtatcttcacttcaccgacggcgacgagcacgaactcgaacctttttttttcccaaaaattagccccctccctgccctgcggaccctgccccagtctgcactctacgatggcggcgcctccggccacggctcccgcggcctcccggtgtctctccggtgccaagtcgtgctgggctgctgagcggagctccagctcgtttgccgtctcggcgccttctactggcctccggcaaagtaggagccgcgtcctcagcgtccgtgccaaggtgagcgtcggtcgagactatcgtttccgcagatttgactactctaccaagtgccagtgacttcctttgctagttttgactgtgtggattgtggtgctttaaaaaaaatccttgcattgcagtcgtctcatccaaatcccatgctaccatggaattctgaaaccgattttttgaaacccctatgggattgagctgttctgtgttcttccacgcaggttgccactggcgtgcagagagccagcactgtggatgatggaggtgggttgtcttttattagttgttcagacatcaagttgtgtattcggcacgtggagtgtgcacctgggatcttgtagcacggttcatcgattatgtaccttacaatttaagagctctgttatttctggttttaccatttttgaaatgtccatgcagcgaaaaggccgtggaagctcagtgatgctcgtcttgtctg

SEQ ID NO: 5893 - DNA, 1002 bp, Zea mays
  misc_feature (376)..(376): n is a, c, g, or t
  misc_feature (776)..(777): n is a, c, g, or t
  misc_feature (782)..(783): n is a, c, g, or t
  misc_feature (787)..(795): n is a, c, g, or t
  misc_feature (797)..(799): n is a, c, g, or t
  misc_feature (802)..(802): n is a, c, g, or t
  misc_feature (806)..(806): n is a, c, g, or t
  misc_feature (813)..(816): n is a, c, g, or t
  misc_feature (820)..(822): n is a, c, g, or t
  misc_feature (825)..(835): n is a, c, g, or t
  misc_feature (838)..(839): n is a, c, g, or t
  misc_feature (842)..(847): n is a, c, g, or t
  misc_feature (854)..(860): n is a, c, g, or t
  misc_feature (862)..(864): n is a, c, g, or t
  misc_feature (866)..(879): n is a, c, g, or t
  misc_feature (881)..(885): n is a, c, g, or t
  misc_feature (889)..(902): n is a, c, g, or t
  misc_feature (904)..(917): n is a, c, g, or t
  misc_feature (923)..(933): n is a, c, g, or t
  misc_feature (935)..(938): n is a, c, g, or t
  misc_feature (943)..(949): n is a, c, g, or t
  misc_feature (963)..(966): n is a, c, g, or t
  misc_feature (970)..(977): n is a, c, g, or t
  misc_feature (979)..(986): n is a, c, g, or t
  misc_feature (988)..(990): n is a, c, g, or t
  misc_feature (992)..(998): n is a, c, g, or t
ctatgacttgcctgtgcaaattcctattcaggtcctccagcgccgtatgattgcacgtggaggtgaacatattgctcaaatcaaggttcgctggtccgggatggcacctgaattggccacctgggaggatgcaactgcactgcaagcaaaatttccagcagctccagcttggggacaagctgggtttcaagagcgggggaatgttagcaacggcgttgatacagtgctgccgacgaaggagaacgccctggaaggaagcaagatgaccaaggaaagctgtggagcacggaagcgtattccaaattcgaaatactatgggccacgatgggccgtgtaagcagccgtgggctggatgtaatagttgttgctaagacangcatttaaagaagctcggaggtgttttgatgactgccagcgtgttaggggcttggtaagccaatactatctttggtttaaattcctgtggctatgcctttgtttgtccaccctttcatggcgtcaaacagtatgttacatagcaacaactccattggttagatctgttgcagtcttgtaactcttgttatggtaaaacctgttagtcctgtgaccagtgaactcatgcttctatgttatttgcaacttccaggttgatgagtggtacgagcagccagcagccacaattgtcgattgggtaacgatagatggacagagcgtgggtgcctggatcaacctcgtgaagcaactccacatggagatctccagacggacgctggcaatgtcatctgtaggagacnnctganncaannnnnnnnntnnnttntaantctcccnnnncttnnnctnnnnnnnnnnnttnnttnnnnnntcctccnnnnnnncnnntnnnnnnnnnnnnnncnnnnnctcnnnnnnnnnnnnnntnnnnnnnnnnnnnncttccnnnnnnnnnnntnnnncttcnnnnnnnccccctctcccaannnncctnnnnnnnncnnnnnnnncnnntnnnnnnnccct

SEQ ID NO: 5894 - DNA, 389 bp, Zea mays
agtgcagttccgaccaaaactatgtgtctcagggtttcagcttcgatgcatctcctatatacagctcctgcttagcataaacgtaccagaataaataggtcctcaaacctgtaggcattcttacaagtgcatcatttcctaatactagtgcctccaattggatccatggcacctgaagatgcaacatctgctgatacaatcagttgagatgttctaccgaggcaatgccaatcttgctttccgaacaaaatcaaaccaaagaggatacatcgcatcgctgtggccatcaaaccgccgcttacccgacctgagcactgaacgcgacacgctgaggcatctatctccagggtccccaaccttcccgacatctccatcttccacatccacat

SEQ ID NO: 5895 - DNA, 1274 bp, Zea mays
  misc_feature (576)..(578): n is a, c, g, or t
  misc_feature (610)..(612): n is a, c, g, or t
  misc_feature (617)..(620): n is a, c, g, or t
  misc_feature (622)..(622): n is a, c, g, or t
  misc_feature (627)..(653): n is a, c, g, or t
  misc_feature (656)..(666): n is a, c, g, or t
  misc_feature (669)..(685): n is a, c, g, or t
  misc_feature (691)..(699): n is a, c, g, or t
  misc_feature (704)..(713): n is a, c, g, or t
  misc_feature (718)..(719): n is a, c, g, or t
  misc_feature (721)..(731): n is a, c, g, or t
  misc_feature (733)..(733): n is a, c, g, or t
  misc_feature (735)..(740): n is a, c, g, or t
  misc_feature (742)..(745): n is a, c, g, or t
  misc_feature (747)..(749): n is a, c, g, or t
  misc_feature (752)..(758): n is a, c, g, or t
  misc_feature (760)..(762): n is a, c, g, or t
  misc_feature (769)..(779): n is a, c, g, or t
  misc_feature (781)..(790): n is a, c, g, or t
  misc_feature (797)..(802): n is a, c, g, or t
  misc_feature (804)..(826): n is a, c, g, or t
  misc_feature (838)..(838): n is a, c, g, or t
  misc_feature (846)..(857): n is a, c, g, or t
  misc_feature (859)..(868): n is a, c, g, or t
  misc_feature (870)..(878): n is a, c, g, or t
  misc_feature (880)..(880): n is a, c, g, or t
  misc_feature (883)..(883): n is a, c, g, or t
  misc_feature (889)..(892): n is a, c, g, or t
  misc_feature (894)..(896): n is a, c, g, or t
  misc_feature (899)..(914): n is a, c, g, or t
  misc_feature (917)..(920): n is a, c, g, or t
  misc_feature (922)..(939): n is a, c, g, or t
  misc_feature (941)..(942): n is a, c, g, or t
  misc_feature (945)..(948): n is a, c, g, or t
  misc_feature (951)..(955): n is a, c, g, or t
  misc_feature (957)..(957): n is a, c, g, or t
  misc_feature (964)..(971): n is a, c, g, or t
  misc_feature (975)..(978): n is a, c, g, or t
  misc_feature (982)..(983): n is a, c, g, or t
  misc_feature (991)..(996): n is a, c, g, or t
  misc_feature (998)..(1005): n is a, c, g, or t
  misc_feature (1015)..(1019): n is a, c, g, or t
  misc_feature (1022)..(1037): n is a, c, g, or t
  misc_feature (1040)..(1046): n is a, c, g, or t
  misc_feature (1050)..(1052): n is a, c, g, or t
  misc_feature (1058)..(1062): n is a, c, g, or t
  misc_feature (1068)..(1068): n is a, c, g, or t
  misc_feature (1070)..(1078): n is a, c, g, or t
  misc_feature (1080)..(1081): n is a, c, g, or t
  misc_feature (1083)..(1101): n is a, c, g, or t
  misc_feature (1103)..(1104): n is a, c, g, or t
  misc_feature (1107)..(1110): n is a, c, g, or t
  misc_feature (1117)..(1124): n is a, c, g, or t
  misc_feature (1126)..(1128): n is a, c, g, or t
  misc_feature (1130)..(1131): n is a, c, g, or t
  misc_feature (1134)..(1136): n is a, c, g, or t
  misc_feature (1138)..(1140): n is a, c, g, or t
  misc_feature (1142)..(1147): n is a, c, g, or t
  misc_feature (1152)..(1156): n is a, c, g, or t
  misc_feature (1158)..(1162): n is a, c, g, or t
  misc_feature (1164)..(1164): n is a, c, g, or t
  misc_feature (1168)..(1187): n is a, c, g, or t
  misc_feature (1190)..(1194): n is a, c, g, or t
  misc_feature (1198)..(1202): n is a, c, g, or t
  misc_feature (1206)..(1216): n is a, c, g, or t
  misc_feature (1220)..(1220): n is a, c, g, or t
  misc_feature (1222)..(1225): n is a, c, g, or t
  misc_feature (1231)..(1237): n is a, c, g, or t
  misc_feature (1251)..(1252): n is a, c, g, or t
  misc_feature (1257)..(1266): n is a, c, g, or t
  misc_feature (1269)..(1269): n is a, c, g, or t
tagaataaattgatctttatttttgtttcaagcaatgatgtacaggtgggtggtcttgaggaagcgtatttagcagccaagtccttacttcaagtaatgaggggaaaacaatctactgtggtggtgctggaaatggctcgacaagtttttttaaccttcattcttcacaaaaattctcagtgtgacgatgattctgactcactcttgatattgggtacttaaggctgcaaagatatgtaacaacatggcaatggcaatcagcatgcttggggctccgaggcctttgctcttggccagaaccttgggatcaaagcaaccactgtcacagacattttcaaatgttcaagcgctcgctggtggagtaggtattctctcctttgttcatcttattgtggtctaagttgctgcgacattgggattttcttcctaagaaattggaagggtaacaaccattgtatggatagtaattttttagcttcggcttgcatgttgcatcatctgaaatttttaattggttttcttttctgttggtttcaatagcgatacatataatccagttcctggagttatggaagnnntaccatcatcaaggaactatagtggtggtttnnnttccnnnntnatggnnnnnnnnnnnnnnnnnnnnnnnnnnnttnnnnnnnnnnnctnnnnnnnnnnnnnnnnncttccnnnnnnnnnttttnnnnnnnnnnccctnncnnnnnnnnnnntncnnnnnncnnnncnnntcnnnnnnncnnntcttctnnnnnnnnnnncnnnnnnnnnnttcatcnnnnnncnnnnnnnnnnnnnnnnnnnnnnncccccctttccnttcacctnnnnnnnnnnnntnnnnnnnnnntnnnnnnnnncncantccctnnnncnnnccnnnnnnnnnnnnnnnnccnnnntnnnnnnnnnnnnnnnnnntnnccnnnnccnnnnntnaacttcnnnnnnnntccnnnncccnntcttccannnnnnannnnnnnnaaccttctcnnnnnttnnnnnnnnnnnnnnnnacnnnnnnnttannnatatannnnnatactntnnnnnnnnncnntnnnnnnnnnnnnnnnnnnntnntcnnnntccttcnnnnnnnntnnncnnccnnntnnntnnnnnntctcnnnnncnnnnntntttnnnnnnnnnnnnnnnnnnnnttnnnnntttnnnnnctcnnnnnnnnnnnctcncnnnnattctnnnnnnnttttctattctatnncttcnnnnnnnnnnttnatctc

SEQ ID NO: 5896 - DNA, 351 bp, Zea mays
agttccgaggtgcaaccgaaaattgaggctttcttcaacgaagtgattgagccacagtttgcttcaaacaattatacgtttgatgtgtatgtgaggacagatgggcgagtcaagctcatagatttcaatccatggggtggttataccttgccgctgctgtttacttgggaggagcttgaggagaaggggagagggtctgagctggagtttcgggtggtaatgcagcagggtgcagtgaggccaggattgatgacagctgtgccatatgatatgctggattggggtgaggggagtggctgggatgtttttctgaagaaggctgacgaggagcttgacagacagatatgaact

SEQ ID NO: 5897 - DNA, 397 bp, Zea mays
aggatcggcgtcgacgccgccagggtctcccagaggctgcacgcgctgctgcttgctccgacgatcctcgtctgatcgagctgagagagacctccagaccacggcctatgcaaccaccgtgctaatggcgtagtagtactctagtatagtactagtactgtatgagttggtagtcaaagctgcagcctgcagcagagagcggtgcagtagcggggaactataagccgccggcgcgcgcattcttgctggtttctttgcagttgtgcatatttaggagcgagcaaagtaaacacaggctgcctttttgtttttgtttttgtctctcccacctcttcgaaccagtagactactactgctactacttgtgtctatcagtctatgctcggatccagtgtta

SEQ ID NO: 5898 - DNA, 681 bp, Zea mays
gggatttcttatggctaggatgtcggtttgttcgcggggtttaaatgaggataaataaaagggcttccctttagtggggggttttgcgagatttatttgccggcgatttgactggatttgatactgttcccgagtatggaggatgcgaacagaggcctaatctgctgtttgatgttgttcttgtgcagaggtacatgcagctgcacaacgaagtagagctgtcggccctcggcatgggtaaatctcttgcctcctgaagcctttccctttttatctgttataaaacgcattttcccgttcattttatctcctcaggactgggtttcgtgtgttccttttctaattttccctgaataaatcaatatagcctcccaaggccacggttcaaacatagagagtaacttttgattttaaattagttgtggttagcttctctgatagaacatggaagatggttcctgacaatcgtcggattaattgtggggggttgttgtttatctgaaactaggccaagtgttttagagttcaggattttccagtgtatgtgatcacaaaaagctagtgccctcatggcttgctgatgagggttgtggtttgaagtcttgccctccgttgctgcaatctgccatttctactttggctacaacttgctttagacatcatgtgcagcatgctgccatc

SEQ ID NO: 5899 - DNA, 409 bp, Zea mays
tccctattggctttgagggctatgagaagcgcctcgagatcacgttctctgacgcgcctgtctttgaggacccttgtggtcgtggcctgcgcgccctctcccgtgagcagatcgactcgtttctggatctcgcacggtgcaccatagtgtcacagctctccaacgagagcttcgactcatatgttctgtccgagtccagcctctttgtgtatccccacaaggttgttctcaagacctgtgggacgacgaagctgctgctcgccattcctcgcatccttgagcttgctgcagggctgtcactgcctcttctttcagcgaagtactctcgtgggaccttcatcttccccggcgcgcagcccgcgccacaccgcagcttctcggaggaggtatctgtgctgaacgctttctt

SEQ ID NO: 5900 - DNA, 364 bp, Zea mays
ccccgcccccgccgccgccgtcgagaagaaggaagagacccaagaagaggagaagaaagaagacacccctgcaccgcccgccgccgagactgctcctcctgctgatgcagcagctgctacagagcagcccgctgcggaggccgcggcagaagctgaggctccacctgcacctgccgtggcggagccggccaaggccgaggaggagacacccaaggcctagctagctagggttcagcaggttcatcttcttgcgcttgctgcccctagctagctagctggtgtaccgtgctctttaatcacgtcaccatccatattgttgttgcatatatatgcacacaatgtttttgttgctccagatgttatt

SEQ ID NO: 5901 - DNA, 940 bp, Zea mays
  misc_feature (684)..(684): n is a, c, g, or t
  misc_feature (901)..(902): n is a, c, g, or t
actttattgggtcttctactactggtctgcacaccgaagtgcaggtaacaagttgactgttagctacatgaattactttgttttgttctcgtttgttctttatcctcccatttgtaccatcattaatcaggacttgcttatggatcttgtaatatttctcgtttcactttttgttactagaaacatgacctagtttagttctagatctgttgttacaagcgattaacaaccttattttagcactcctgggtattgactgaggaataatcgaaccttttaccacttgtccaaggtaaaaaagagagcataaatatgactggtttgattgtaaatggtgattgaagaaattagtgatatgtaatgcatataccatttgatgcatttttctacgtcaagatgaataaggtgaattcaacttatgatttggatacttttttggcaacaggtgctgagaacttaataccaattgaattggccataaagattgcaagaaagattaaggcaaaggaaagatttgcagcatacattgttataccgatgtggcctgaagggaatccgacaactgccgctatgcaggaaatcctctattggcaggttcgctcatcatcatggtcgcattttcattgaaaatattctatgcttgtttttcctcccttacgttttttccattgtttccattttctnttcaaggggcataccatgtccatgatgtacaagattgtcgcagatgctctacgaaaggagggtttacatgaaaggcatccacaggagtacctgaacttctattgccttggcaaacgtgaagtctcgaatgaagttccgacgacaggcaattctaatgagaactctgcagtggtaagtacacataccgtgttctagaatgagttgctcaaatgcgctnntttagatctgtttcgtgaggataggctgtcctctctct

SEQ ID NO: 5902 - DNA, 399 bp, Zea mays
tcaggagatttagcagtggcagacctgagatgccttggcgatgacccctgggtgtatatgtcatcaggaccacgagggagcgcaggaggctatggcagtgttctgtgttgtcaccgctctcaagtttttgtcagccgaaaggatggattggaggtttggtcccgactggaagagcaccgccacaacacaggcgaattgacagagcaatcaggagtaaaggaaagacccaaaaatgaaggaattgatggcagattttataggagttgctatgtggacacagaaaaggatgctaagcgtgggatgatacagatgattgaagggggtggagaccgcttgtttgtgacaagagaagagatgcaaggtgtggaagtgtgggaaacctcccaccttgctggttct

SEQ ID NO: 5903 - DNA, 387 bp, Zea mays
cttggaccatagtgtgtggtggaggtggtaaatcagggcaatcagataaatactgctgcatgatagttgatgagcatgagattcagcatttctattggaatgtcatgcaggcagtcagcaccgtggccagtcatgatgatgactacaggaaagctttgagaggaccgctctacgtcaggatccgtgagtaccaggattctgatgacaaggcgaaggtggcagcaacagaggaaaatgctaccgaggcgccccctgataatgccactacacaaaatcgtttgtcactaacaaataccgtatcgaatagcgagattgtggaggagtccgaacagaacacatccgtcactgtggtggatagtcttccaactagccaacaaccctatgtat

SEQ ID NO: 5904 - DNA, 830 bp, Zea mays
gcatatggtcaagtacaagtatgtcccattcagctttggaaagcaggtgagacctctttgtttctgacctgaaatttacacaaatcatgctttgtagcagagtttctcaaagttgataccaaatggtttttatttcctgtggtttctactttcgattgtgtctaagtctagtcaatgataactttgtgttcattcagcgtggctggatattaattaggttcgccacgggtttattttgctgttacaaacttatgtgattttgttgctttcaagtaatgaattctggcttgtccgtagcggggaaaaatataggaacttgtataggagcttgggaatgtttgtattttattcgtttattatctgcttggtactatacagtccattaaacaccaccatgtaatggcaagtcttttttctattctgaggctaattgttttacatcatgcccattgacaatgcatgctccctagaattgactgagaatatggaagtcttgccctgcatctgcaatttggtcatcatatgtagattactaaactctggtcgcaattccaatgcagaggtatggcggaaagaaacgccctggagccagtgcatcaaaagagtaaagaccggagggtcttgtacctcaaagagcaaatgcctgtgttatctgtgaggcattttgctggcatcatggtattttgagtaccagctactgatagtgaatgcacaccatattcactagtggagtctgcagagaagctaaccagacttttgcattggttaatgattcctgtttcacaagtcggtagtttatgtacaatgacatggaacatagctagtaaatc

SEQ ID NO: 5905 - DNA, 848 bp, Zea mays
  misc_feature (785)..(786): n is a, c, g, or t
  misc_feature (804)..(805): n is a, c, g, or t
  misc_feature (819)..(821): n is a, c, g, or t
  misc_feature (834)..(836): n is a, c, g, or t
tggcttctctcccagccgcaaccgctgccgcctctatctctcccttccctcttctctctcccctcaactctcctcattcttcgcaggctgagcagcaaccgccccaatctgcagttcaagaaccgcccacgcagaacccctccgccctccgctccttccaacttgctctctacctgcaccagcctcgcccacccttcgctcgccgccgccatggggaggggaaagttcaagggaaagcccaccggccgccacagcgtctccacaccagaggagatcggtaacgacgcgcccgcccgccccatggtcccatttataggtcgaattcgatttcatatctggagcgtgccacagcgagcctagacgactgcttgatctgatgatttcaatgtgagctagttctggaccgggtttgcgtgatcgagcagaactcaaaccatttatttagtagcttgtcgcgagttgtcatttaagttcctggttttaagtctgtgctacgaggtttccatgggattcgttcgatgcttggaggaacgatgatttgttcatctagttgttcgatttagaggctcaatgataaagctctttagaggctagatacaggaaataaatgctacacttagctttcttttttcattaatttctacctgtgtatatatgtctaaataattagcacactatatttggcttgtttctgataactttatcctctaaataattgcagctgctggtacttcaggtcgcccctcgcacctttatgaaggtctgtaatatccattcatttagtnntcatccacattgatgagnnctacttttattccnnntgaccctttgccnnncctatgattcaa

SEQ ID NO: 5906 - DNA, 502 bp, Zea mays
  misc_feature (72)..(72): n is a, c, g, or t
  misc_feature (75)..(75): n is a, c, g, or t
aaactagcattgttctacaaactgatggacaaatcatgccttcaaatctaattgttcaatacacaatacttnatntttgaatatataagacttctaagctgttggagcttaagggcatccttctcttccaattccagtcttgttgctcagagtaaaagcttctacaaagcagtaaaagaagtattagtatttgtctatttaaacatgtagagtatacacatgtgtgacagctcaaaaatatcacctgcatcccttcctgcatctcttgaaggcaactccaaaatgtttcaggttggtcagcattagatgcatctatgaaacaaaagtgtaattatatcattatatgtacgtagcataatttttggaaaagaaagaacaagtatgaattgtgcaaagcaattatacctagatacttgcgtcgcatccaatcttgtgagcacataagcgcctccaagatctctggagtaagtcggctgcggtgctcgctaagaacacgaccact

SEQ ID NO: 5907 - DNA, 381 bp, Zea mays
gccgatccaaggagatcttcggaaatgaagcggatgataaatgccctgtgattcactcacaggcattctcccttgggacttttgatggtacttattagaaagatctgctgccttttgttgtatctttatcccataagaactgtgagaccaaatcttttcgatgcccatggtatggtagcaaaaattagactttaacttatccgatccaataattgtccgttgagcttattttttcttcggaatgtgattccaatttagcccttaattgggttgccaatccaactgctcgattgagcagcgatgctggaattttactcctctagggatccgtagtcttgcacttatgcggcattacgactccaacaccctcatacagaaaaa

SEQ ID NO: 5908 - DNA, 460 bp, Zea mays
gcgattgaaaagcttaaaaataatgagtgcacacctgcggacctatgctactcattgcaggtacttgcatgctcttaaacttttcccccttgtggataataattggttatgctttcttgacagtgacactgatgaaagtcctaatttctcaggaaactatctttgccatgcttgtcgaaattactgaacgtgccatggcacactgtgattcaaaggacgttcttattgttggtggcgtcggttgcaacgaacgtttacaggagatgatgaagattatgtgctcagaaagagggggtaggctgtttgcaactgatgaccgctattgtatagacaatggggcaatgattgcatatactggtttactggcgtatgcacatggcatgaccactccccttgaggagtcgacatttacacaaagattccgaactgatgaagttcatgcaatttggagagagaagga

SEQ ID NO: 5909 - DNA, 351 bp, Zea mays
ttttttatccctagagtggcgccaagagttgaattaggtgtaagagcaaatttgagcgtggattgtgggggtatggcggcctacgcaagttcaccggactgatttcgtcgccgtccatgaatggggacccggttgtctgaaggagaaagaaagggggatctctttgtaaatgtcagtgactaagaaaacagtgccttggattagccttcagttattcaaatgcccagggagttctgtgaaaaagggctcgcgcgggcgtggacgcgggcgcgttcccctgttcgcaggctgactcgggccagatttggcccgtcactattcattgtttcttcttttctttttactgccagc

SEQ ID NO: 5910 - DNA, 932 bp, Zea mays
ttgaggagcaactgagcaggtgaaaatcttgattctttaatgctgcttacatgtgaggtgtgaatatatatcatttgtgatttctgagtcgttcacagtatcttttaatcttgcataaaaaatatgtatttcgaacatctctcataagaatttacatgatttgcacgtgctatataataaactgtccgcaatattttagaactttgttattgaatctgcatttgctaaatgcagaaatggaatgccttgtatgatattctgcaagaacataagttgtctttgcaaattgcaagtttgtgttctgaaaatacttgtctgctgtatctgctgtaacttactctcggtgacaggttatgaaaaacatgggcgagatattgaaagctagtggtgctaactattcttcagttgtgaagacaacgatcatgtaagtaaatgttctttatgttttgctcaagatattttgatgtcttcaggtgtgattctattattttacctgcaggttggctgatctgcaggatttcaataaagtaaacgagatctatggcaaatgtaagtttgagctgtgttgctccacctgttcctaatggtgtaattccattctttaataacagagctgtgacagcgttttaccatcatcagattctggatgtcacatattgataatatttgttttcccttcctctgaagatattttcgttcttgctgcagatttcccggcgccagcacctgcacgatcaacctaccaagtggcggcgctgccactgaatgcccggattgagattgagtgcatcgctgctctctaatcagatcatccaaccactcattaaatcatcaataagcacccaggaatttgtggtagaggtacctgtaccagttcagtgtctgaaaactgcgggtaacaaacctttgtgtcccggataagtgatgtgtgt

SEQ ID NO: 5911 - DNA, 564 bp, Zea mays
  misc_feature (557)..(559): n is a, c, g, or t
ccttttcttgtgcttggcagcctgatcagatgccaatgcgatcccatatctccccatctctgacagggaaaataaaatctctccgcgtctgctgcactaccggctggtggttgtgcacttgtgctcgccagcgcggttgaatcccatctcacctcccctcatctgccgtcgtccggtgactgacaggacgaggctccttttccgcaccagcagcgccctctccacttgatgatggcctggcctgctagctcgagaagaagaaatgggcaagcagtggcaatgagatggatgttcttggtttagcagttcttggtcgttgcctgaatcctgcacattttactactacagttgtgagccagaatcgcacagatctgcctgaattcttcttctgaatatccacagcaatgcgaaattggacctgcggaaaaggaatgggcaactgattggtacagtactcactagacaataataatcctgaccaatatgtaaccatatccgcacagaagatgccagggttagattttttttgttgttgttgcaggcccatgaacagtccnnngggcg

SEQ ID NO: 5912 - DNA, 194 bp, Zea mays
gagatggggccaacaacagttcttcattagggggaagttaataagtttacaaaccaactcttcgcgagttggtgcttccctacttctactctacattactactactactaaactacactatactactctacattactactacattattctaactatactaatatctaaagaccagtggcgtttagccactggcc

SEQ ID NO: 5913 - DNA, 384 bp, Zea mays
tcttgcgtgcaggtgcagcccgccaatagctgccgtacgcttagactggtttatctgtttgtggcgcaggtaaggttcacggatcgcttgcccgcgcggggaaggtgcgtgggcagacgcccaaggtggcgaagcaggacaagaagaagaagccccgcggccgcgcgtacaagcgcatgcagtacaaccgccgcttcgtcaccgccgtcgtcggattcggcaagaaacgcggccccaactcctcggagaagtagatatagccatgtctttgtgttttgttcccccactagtttccttgtactgatggcaagttgctgaagacttatatgctattattatctgtatcgatgtgttactgcaacactatgaaatatggtatgcatc

SEQ ID NO: 5914 - DNA, 835 bp, Zea mays
gtctcaatcattctacaggtccaagagaaaaaacttgtggaaaattaactggcggttttgataagacagcacaacagatttatttggacagagacctatccaatgctcttaacagcagtgaatcaatacgttgtgagacgagatcaatttcctcttctgaaccgacaactccaaagtctttaaaaggcaattatacttcagagtctggtgaatcaacagatattacaataggagctcttcccatgcagaaaagaagattgcaggatttagttcgaactgatgatgccagtgaaactatttctgggcgatcatcaccttgtatgactctcatctttagatcttgcatcacttctttattttcccttaataatgaaactgtgtgatgaagggcaggcctaatgcagcggtgagagctgtttcattgagtcaccagcctcttcgcatttgcgagggaaagtttgcctcggtttatcctttccttagatgccactcatgtaggagcctccaacactgagtctgcccttttttagtgaaagcttgtgatgaagggtaggcctggtgcagtggtgagagctatctcattgagtcaccaggttaggtttgtcccttccctagactctctcctgcgggagcctcccgcattgggtctgcccttttaataaaacccttttaatgaaaccttgtgaaaagaaagtgacactgtttgcagcaagcatcatatcgtctaacatgatgttgtactcaaaacattgcaggttctgagtcatcgacaactgaattaattgctggacatagtacagattcatctattgaagggaaccatggctgtcaaggg

SEQ ID NO: 5915 - DNA, 367 bp, Zea mays
  misc_feature (346)..(346): n is a, c, g, or t
  misc_feature (348)..(350): n is a, c, g, or t
  misc_feature (352)..(354): n is a, c, g, or t
tgcgctgaatcgcaaataattttcatggacctcacctaacgaaaggaacagtggagctgtaccgttaccgtggactgacataaagtccagtcacagtcaatgttgtatttcggtgctgctactatgatgatgatgagcttcaggctctagattttttttttgtctacttcagatgctgtgcttcaagcaaagtcgagtgccaaatggccaagggaatagacaacaaaacgtacacgatttgagatgaacgtgccagccgccgtgcaggaaacgacgaagctgcaggcataactgtgcttgtctgcaaatgttttgcatcgtcttttagcataaaaataactcatangnnngnnnccaaccaggctat

SEQ ID NO: 5916 - DNA, 491 bp, Zea mays
  misc_feature (358)..(362): n is a, c, g, or t
  misc_feature (379)..(391): n is a, c, g, or t
  misc_feature (407)..(409): n is a, c, g, or t
  misc_feature (411)..(411): n is a, c, g, or t
  misc_feature (424)..(433): n is a, c, g, or t
  misc_feature (436)..(437): n is a, c, g, or t
  misc_feature (441)..(449): n is a, c, g, or t
  misc_feature (457)..(458): n is a, c, g, or t
  misc_feature (462)..(470): n is a, c, g, or t
  misc_feature (473)..(477): n is a, c, g, or t
  misc_feature (479)..(488): n is a, c, g, or t
aacagtgcagctaagaaggatgggtcctgtgattgcaactccagctttgagtgtaatatctgtcttgacccagctaaagagcctgtggttacaccctgcggtcacctcttctgttggccatgcttgtaccagtggcttcatgcacattcactccactctgagtgccctgtatgcaagggtgaggtgctagaagtgaatgtcactccgatatatggaagaggcggtgaagaaggggattccaccaaccctgacttgccacccaggccacgagcaaacagaagggagagcctgagtcaacagctgcaaatggcagacacaagaggaattgcaacagtggtgaggcagttgatacaaaaannnnntgcctatcctacctgcnnnnnnnnnnnnnttttatctgcctctannncnatgacagatgccnnnnnnnnnntcnncctnnnnnnnnncccacaannctannnnnnnnnacnnnnnannnnnnnnnncat

SEQ ID NO: 5917 - DNA, 398 bp, Zea mays
cgtcgcctagggcatacccagctcaccttggacaacaatggtgccttattgcttaggaaccacctacatgtccatgcgaacccaacactcaccttgatacctattcgtctctgaaaccatgacattcatcttattgatgcaatatgcgttgaccttgcttgtcatatcacctacccttttcaaattagaatcgaaaatctgtctggatttccttcaatgcatatttgaggtgtcagaactcaggaacttgcaaataaacctaaaaatatcaattttctgaatataaattttatgctgtcattgcttttctattaagatatggtactgtgtccctacctcgttcatgccctatgatatgcaggttccatccatcttgtgtggctatgaccattgaaaaa

SEQ ID NO: 5918 - DNA, 1015 bp, Zea mays
  misc_feature (991)..(993): n is a, c, g, or t
tgtttcttctccttggactttggattttgtcggagtaattgaggtcatcgggtgcgcatttgggcttatggcgttctgctgctgcctccctgctcgcagcagggattggaagcttcggagtcggtgcggagagcaatggagcttcgtctagttttaggttagtgtgctcagattcttaaaattacatcttcatgttgttactttttatactctcggaaatatgtttattaactcgctagaaatgggtacagctgttttttttatatattcagctaatgttattcttgggactggaattggaggcttggatgcttttttgggcttggcgtattgtcacacatgggctagcaaatgggaaaaaaaagttgtgaatttggttttttgaccttgtaaagagttgcctctcaggctctgggttgaattgaactggcatcagaatcagccaccgggtatttggatcttttttaactgttgtcataatgtcatgcttctttttgtactggatccagcagtaaagctttggagtaaaagccatatagtgaaggatggctaggtcaaaaagaaaaccccgtttcaacttcaattctgatttctgaagcacaattgaccgttcagaaagtaaaaaataattaggtgaataaaaattaatcaagtgaattatttttcatactgccatctatagaaaatgtgtcttcttggcttgccaatatgactaatccttctgtagaaattccaggaccaggagtctgctgcagattggagacagaaacgaagatggcctatttcatctgccacatacacgggctctcacgcacaagagcagatctcatagaaaagttccaacacccgcaccagcaccagagtccgctccagcaccctcaccatccatgtctccaccggacagctcaccgtctccgtcaccacatggttcacacccaatgccacgccaatcaacttcacatcgtcatccatccataacacctccacattnnncaggcctgggcctaggcaagat

SEQ ID NO: 5919 - DNA, 530 bp, Zea mays
gggtttctctggtgggaaagaccctggccgtcatgggcttcgggaaggttgggtcagaggtagcgaggcgagcgaaagggcttgggatgcacgtgatagctcatgatccctacgcccctgccgaccgggcccgtgccctcggggtagagctggtttctttcgacgaggccatcgcaagagccgacttcatctccctccacatgccgctgataccgacgacgtccaagatcttcaacgacgagtccttcgcaaagatgaagaatggtgtccggatcatcaacgtggccaggggtggagtgatcgacgaagacgctctggtcagggcgcttgactccggcaaagttgctcaggtgggtgatcacaacttcgttcgattcaagtgctatcatcacacccgattctttaatgtgagtacgtatatggatgtgtctctgaaagctgagtttttttcatgcatgcatggccaatgtggagcaggcggctcttgatgtcttcaccgtggagcccccgcccaaggacagcaagctggt

SEQ ID NO: 5920 - DNA, 369 bp, Zea mays
  misc_feature (362)..(364): n is a, c, g, or t
tggcgttgagcggcagcactgcattgccgtctctataatcgccttgaattgtatcaacggagattgcgagcagcagttatcttgaacaggcaggacctggccctagaatgcagcctgttgcgtgtcgtgactttctttctattattcgtcaggcagtagctttgtatttaggtaggatcctgagataatacatgttatttctggtcgatatttattagttgcattgaactgtattctgggttgctcatcacttgtatgttaaattggaggaaaattgatgctatgagcttcaggtgaatctgtttcgtgcctgtgttctttcacccttctgatatcagtgtgtggcctgcaattgttgtctnnnactga

SEQ ID NO: 5921 - DNA, 410 bp, Zea mays
gagcggtggtgatgcagcactgcagcagcagcgactccaaccacaaaaaaggcaaaagatatgtatgccttgaatccagctgatgaacatctgaatgtatttttgaagcccttgaggtagccttgactactgtggccttcaggattggctgccctagactgcttggcagaaatggcactgtttgtagttttcttctggtgctcaacatcatcagtcttgagatcaagacgtcggccactgttatctgtaaaccgcatggtctggttgatggatacggaactacttgtggccatcctattaattccaacctgcattttaatcttgccagctgctagtgaaatgttagcaggagatgtggttgctctgcggctttgtattgtaactccagtgtcagtatttcaattttgcca

SEQ ID NO: 5922 - DNA, 533 bp, Zea mays
ttactggacatgtcagagctcttatcaaagcttgctgatgtagaagccactgtttgagttctagttaaatgctcctcaccagtaacatccccattagaagacggtccagacttgtgatcgagtacatcattcttggatggcatattgggtggagcagtgggctcagaggagggattagtcgatgctgcaggagcccactgagagttttgaggtggttcaccatctacaacccatcctgggccgaaacttgtcccaggggggagtgcccttctgatacgatttgctgccacatcccagccaactgggcccaattttgatgcaaatcgtgccaagctcctagcatatgcatgtggctgctgaacccctacctggttcagacaataagaaacaaaaaaagaacaagaaatattagcacagcaagttccagcaaggatagattgaaatacgacggtggttgcaatgatcaactatagttaagttggtaggttttacaagtcagccaaaaattgaaatctgtagctcttgaccacaaa

SEQ ID NO: 5923 - DNA, 370 bp, Zea mays
tgggtgtgggtggggagtttgtcagctgggtggcgcgagcgtcaggcgatggcggaggcggaggagaaggcgagggtcgtggtggttggcggcggcgtcgccggctccctcctcgccaagactatgcagggccacgccgacgtcgtcctcctcgacccgtaaggcttcttcgcccgctccctccctgcgcctgctacccgtttgcggaaatcccgagccgaccggctgcttgctttctctgactgggtgccgggtgcgtgtgtcattgagtggctgtgcgtgcttccacggcccatgtgtgtgattcggtcgccttggctctccaccggtatggcggccccgaatcattgcggccctagagatataaaaa

SEQ ID NO: 5924 - DNA, 530 bp, Zea mays
ttcccgcaacccccttgtgtcccgacaacgctgggagcccattctcgcaccgcacttcgttaggttagtttagatcacatcattctcaggtttgttttaggcttttagtctacacctgtcgcctcaattaattcgctgtggagggggagattcggaggcattagcagaatcaaaatccatggtgttgtacgccgatctcgacgcgctccgggcgtcggcggccgacgtgcggatcgtcacgtcggacggccagaccatcgccgcacactcctacgttcttgtaagacacttgatctttccccttctgcctcggttagttctggccgactcagtcgcgcgccgtccccgtgtggttggttgctggtcatggattcatggttgttttggttttggaatcccaggcctcggcgtcgccggtgctggagaggatgatccacagggcgcgccgcgggtggggcgccgccgactgcacagtcgctgtcttcggcgtcccctccgacgccgtcctcgccttcctccacctactctac

SEQ ID NO: 5925 - DNA, 734 bp, Zea mays
tttgagaaaataaatctagagaacaccccagagactgagaaggagcaaaagatcagcgcaagctatcaaggcatatacaagcagttagttgaaacactaagatatttgggtgtgggagttgtggaaacagttggcaagccatttgatccttcggtaagtaatatttaccctcccgccgcctgttccattctcatggtctgtctctctccctaaaatgttgtatgcaaacaacatattggatccttttgaacgtgtaaaaagaattctgttccagtgttaatgagttgtttttatggcctggttcatactcaagagattgatcttagctttcacacagtttcctgcatctatgttgcagtacatgtctttcggtctaaataatatgggtatttgggagaaaaaaactaataacctactttcagtgcttacagctagatagtatggagatatgcatgagaatcaaatagcgttacatttatgttcatcatatatgcagcactatgggtctcattcttttgttttttttatgcaggtccatgaggccatctcacgagaagcatccatgcaattcaaggcagggattgtcatgcatgaagtccgcagagggttccatttgaaggagaggctgctaaggcctgctactgtgaaggtctctactggctctggcaaacaaagtgcaagctcataggcgggggacaaagatgctgctttgtgaatctgatcaaacgaccaac

SEQ ID NO: 5926 - DNA, 422 bp, Zea mays
gagagatgtcttgcctggccttacgtcgctttcccggcctgagatcacagaggacgtccagttgctcgaggggttagtccaggcttccgggggatcctgggagtcgagcttgactaggcgaggacgttgtggtgggcgtgctagaggcaggaaacctcggaaaactgtagtaaccgtaattgtagaggaggaggaagaggaggaggtagaggttagcccaccgccaaaacctgctggcactggggaattggaagccgatggcaggggtatgatcgggtggggcagaacaacaaggcggtgtcgcagagcgagatgtccgtcaggtaacagcatggctactgcgtcttgagtgggagggtatttcttggcagcaagcattggacctgattaggtactgggtggttcacaattgttgtattgaa

SEQ ID NO: 5927 - DNA, 403 bp, Zea mays
ccccgtgttctggttccttacaggcgagcacaggtcggtcttcgcagcgatggagtccaggggcgaggaaggctggtttcaactggacgccgtcgtggcggtggcgctgtcgtgcgtcttcgggctgctcatcagtttctttggcttcgcagccaggagagctgtatcggcaaccgcgttcaccgtgaccggggtcgtgaacaagttcctcaccgtggccatcaatgtcatgatctgggacaagcatgccagtgcgtatggttcggtctgcttgctgttcaccatcctcggtggggttctctaccagcaatcggttacggtgaaaggaaacggtgcgggcgtggcacagcgtgagctggtgcccgagcaacctgaggaggttgacgaggagaaacaaagctta

SEQ ID NO: 5928 - DNA, 416 bp, Zea mays
cccttttatcccgcgaaaccccaagcgccagaagcaattttcatctgacctaccttttcgtttttattcgatgcttcaacaggtcctggagcttgctgggaacgcagcgagggataacaagaagacccgcatcgtgccgcgtcacatccagctcgccgtgcgcaacgacgaggagctgaccaagctgcttggtggtgccaccatcgcgagcggcggcgttatgcccaacatccaccagcacctcctccccaagaaggctggctcgtccaaggcttccaccgtcgatgacgatgacaactgaagctgcccactggagaagaggcattcgctaccgtcttgtttcctaggtttagcacgcagttagtcagcatgtctttgagagagttcgatgtgtttgggaatgacaatagctcctt

SEQ ID NO: 5929 - DNA, 654 bp, Zea mays
gcagcagctgctgcagaggaaggggaagcccgtggctggcaagggagcggcctccatgaccgtgaaggcagagaaggtggtggtcgcggtaagggcagccacgagggagatctccaagacagccgtcatctgggcgctcacgcatgtcgtgcagcccggcggaagcatcatactcctcgtcgtcatcccggcacagagctctggtattgtttccgcttttggctttcctgtttgcttctgggcatcaatgagtgctcatgtgcacgtttgcttgtactactaatcatatccactttagttacaatgatcacgtaattccatggtttttattgcctagaggtgtcaatgtttctctccggttttccagtagttgcctgaaaaatatctgcacgcttcaccatttcaggcagaaaattctggggttttccactgtttgccggagactgtgcaagtggccataagtctatggtggatcagaaatgtgatttatcagagttgtgttctcaaatgttgaagaaattggatgtgtatgatattgacatggtttgacctggtgctaatgctcgtttacatgtttattaaaattatcatatacttgtgtgcttaatttatctgtgcttctgtagataaatgtaatgtataagcttgtttccg

SEQ ID NO: 5930 - DNA, 387 bp, Zea mays
gtgctcttcaccgaccgccgctcccgacccaccgtcaacctcttcgccgccaacgccaccgccttccacgaggcattcgtcgccgccatggccaagctcggcaggatcggcctcaagaccggcgccgacggcgagatacgccgcgtctgcaccgccgtcaactaagcctgccttggctgcttgctgcttgcgtgcgtgggtttcacttatttcacttcttctttctcttgtttatatacgtacgtttgtcggatgaattttgttggtagccatgagatgagatccttgctctgagctagcggacctgccccgattggatgatagagattgatccagatgttcttctagtagattctaattctttatggatgtttcccattgacacac

SEQ ID NO: 5931 - DNA, 366 bp, Zea mays
tagcgctaatttattattacaaccaccatgtccggtaatagtagattaaagagtgctaaggtctctgccctgtgcagagagagagagagggagggagtgaaggggggcctggacctaaccatggtagtgacactgagaagtaatgacatctacatgagtggggtgacccaagacaacaaaaattcatctatgggtccattgtgttaatgagttacacagcagtgcttggttactccaaagccttctttggagtccccaatgctgtgtttcgagggacagggggtagtgccaagtgctaaaaacaaacattggcactactctgaacctgtttctgattaggggcacaggctctccttagagccttga

SEQ ID NO: 5932 - DNA, 389 bp, Zea mays
ccttccgtggtgttggcgctcccttccatgatgttggcgctcccttccgtggtggcttcagtgacgtggtctgccgggcttgcaaccagattggccatacgagtcgtgattgcatggctggtgccttcatgatctgccacaactgtggcggccgtggccacatggcttatgagtgtccctctgtcagtatcatggaccggttcccccctcgccgtttctgaaggaaggacatccaagggctgttcagatggctgttgttttcagcccgttttgtcaagagcacctgttttgctttgctttatgtatttctaaacccgaatggattctagatatttcagattcataactcatcagcgatatttgtaattctggatatgttacccgactcc

SEQ ID NO: 5933 - DNA, 405 bp, Zea mays
cttcagggtacattcagcttctgtggaacatgagtgacacacgggggatccagaagtcagaaggcataccgaaatctgtcctttgatttaatgtggattatatagatgctcatcactcagccatgctgttgcatagtgctaaatatgatctagatctaggtcctggtctggataatgctctccacagcatctgctgtgcgtgtgacctgtgatcagttcagtcagttgatcaggttgtaaatgacacttgttcctctgtttccggcgcttactgcgctgtttcagacttaaccatggctattatgaagtgatgaagcgtgggggttttttgtctgtctactttatcgcatatgggggagctctttccaggatttatatgccatgtgtttgttgatgtacatgaaa

SEQ ID NO: 5934 - DNA, 495 bp, Zea mays
tgagtactgttcttctagatccaattcaggaactactgggattcccaattcaacaagcaagtacagagaggtacgctaagcaagccaagtcaataaattccttggattgttggaacagttgtatgatgtacctgtccttggatggattgttgcaggacaaaagggtgaactggcactcgactccctttactataaggctggatagagctttgaagaaaacttcggcatgaatgaattgtttctgtttattcagtcttgaatggattgtatcttcattcagcatggccttgcaatacacgacagtggatagtgcctatttctatctgtttagtctagtagtttacatgtgctaattcgactgcattacacgggggttcatatgtatgttaaatgtccatgctgccgggcgccggcgctgcaaagttgtggcttgtttgcgtctatcctgggcgtttgtttgctatgcacaacttgtgaccatttatcacgctcaaa

SEQ ID NO: 5935 - DNA, 376 bp, Zea mays
cctcaaccgtctcgatgagatgatcgtgttcaggcagcttaccaagctcgaggtcaaggagatagcggacatcatgctccaggaggtctttgacaggctgaaggccaaggacatcaatcttcaagtgaccgagaagttcaaggagcgggtggtggacgaaggctacaaccctagctatggtgcacgcccgctgaggcgagccatcatgaggctgctggaggacagccttgctgagaagatgctcgcaggggaggtaaaggagggcgactctgccatagtagatgtggactcggaggggaaggttgttgtgctcaatggtcagggcggcataccggagctctcaactccggcgatcaccgtttagctcgtacataaa

SEQ ID NO: 5936 - DNA, 386 bp, Zea mays
ctgcttgctgtctcagttttgttgagcggctctggagggttgcgtgttatgagcgtcgtccgtagtatggtttgtgacataaggtagctatgatgagcctagaacaaacataaacaaagtgcgggggaaacccttgcttttagtgactccattagtagtgctatgtggtttgtgacatggtttttaactatgatgttacgccgaatggtaatatattgaagaacgtgccgtggccctacacaacttagttattatttagactagatggagcacttaccaatgttggacttgttaaatctgggttttctgaatgtaaatgatactagtaattgtggttaagattaatctatggtaggcctggaataccaggactagggctttgaagg

SEQ ID NO: 5937 - DNA, 342 bp, Zea mays
gacgttcttcctcatcaagagcaaggaggtggtggggaagatcgtcggggcgaacccagacgaggtgaagaagctggtggatgcttccgccgagcccttggagactcagatagtcgtggagtagtagtcgtttcagactttttttttgaagagtcgttcgtgtcttccgaaactgctccgcgagactgtgcgaccgtgagtgcttcttggtcagggtctggatcgtcccggactgtccagtgtcgcccgtgcgtgtgcgtgtgacgtgtgtgtgtgatgggtttctgtcgctttgtagcagtagtagcacagccttgcctgttgggctggtagtggtactgc

SEQ ID NO: 5938 - DNA, 370 bp, Zea mays
ctaccaaccataccggcgatttccagtgccatgtaagcatttcagtcaacatctgtacagataggagtaaaagatacggtccaagcagcactccaaatggaacgaatggtagttgtggctgcagagtgcccctgcgagatgcaaaaaacagggcaaatggaaccacaaagcctactatggtagcagccagattccagaacctgtaggaaattggtatctgccttttcaggtcaaaaatactgttctcttgacggccgcatgcatcagccataaggaaaaacaacattgctcccatattaaaaatgaagtcaagtccgactagagatagaaggccagcgatgttgggaccatgaaacactgaagacaatgg

SEQ ID NO: 5939 - DNA, 380 bp, Zea mays
acgacgaccggagcgtagcctcgttgcttgatccaacgctgggtggagaccacagggaagacgagctagcggtcatcggcgaggtgatccgggcctgcatgcagagcgacccgaggcgaaggccgagcatgagggaggtcgccgccaggctgagggaggccgtgggtatctcgccggtcgctgcgacgccgaggctgtctccgctctggtgggccgagctggaggtcctttccgccgcggaagcaagctaataatagtgggcgagaggacagggcaggaacaggaacagggcaggatgatgtcgcgcaatctgaccagtttgttctcaagaaaagaaagccttgcagccctttgtgcatgctgtaaatgtgaatgtgaag

SEQ ID NO: 5940 - DNA, 176 bp, Zea mays
aattgaaaaactacaggctactacaacccaatgcttcctttcaggcacatatgtaacacatatataatcatctgaggtactctcttccgttccaaattataaaacgttttgggtatatctaaacacatatcttatatttagtatagcaaaggccatgaatttagaaaagccaaaaa

SEQ ID NO: 5941 - DNA, 179 bp, Zea mays
cttcactcggtgtagtggttgtggcaccccccctcccccaattcgccgcactgttcggtagctcctgatgaacagtgcaccatcacaatcactttctgtttttttttcttcttcttttcaacaacaaggtcatggcgcgagcacttgtgttgtgtttttacagttgggggggggggggg

SEQ ID NO: 5942 - DNA, 490 bp, Zea mays
ccttagccacaaagaacggtttacggaacaaggagatgccataacatttgagtcagaggtgaattttttcccagtacttaatgaattgaatgtacatacatattatttaaatctgctcaaactagtctgggacttgcatcttggcaaggcctgcattttttattgctatcgccacacatataactatatgcttgcttctgtggatagttaaacacaactgtagaagattttgggctttacttgtttttactggaattgtactgtccgagatgctcaagatttctaaggtcattggtggccccttctctttgttcaatctctttacaggtcgaccgagtctacgttagctccccaaatgtagtagcagttattgaccatgagaagaaacactcgtttgtcataagaaaggaaggacttcctgacgttggtaagatctgctgccccttgccaaaatgccaactaccagaaaatcaatcgacttttcaaaaaa

SEQ ID NO: 5943 - DNA, 384 bp, Zea mays
ctgcacgagagcaacgtggacgccgcgacgactgtgtccacctggatcgggacctcgttcttcacgccgctcgtcggcgcgttcttggccgacacattctgggggcgatactggacgatactggccttcctctccgtgtacgtcacggggatgacggtcctgactgcttcagctcttctcccgctgctcatgggcgcgtcctacagccgtagcgcccaccgcctcttcgcgtacctgggcctctacctcgccgctctcggcaccggcggaatcaagccgtgcgtctgcgcgctcggtgccgaccagttcgacgcgtctgaccccgtggagcggcgggccaagggctccttcttcaactggtactacttctccgtcaacatcgga

SEQ ID NO: 5944 - DNA, 526 bp, Zea mays
ccaccatgagtatatccaggaatgggaagcacgacgacagcgcatatttcgagatacagagcaatatgatccatcttcttatgaggagtatctgcgctggtactcaggagcaacacggcggtaccttgtcccagcaaccagtgacgacggtgaagcgggaccttcagctccaactgacgatttctcagatcttcagtaccaagccaaatctccaataatccgcaaagcagtaaaacacgaatcacttatttagttcatatttctggaaacaaaatttcatgcactgtttaagatttgagtacaagcacagcttctctcaaaattactaatgcatatagtggaccagtatttaatttgaagttttccctaactgttgtaggttgataaactggaaagcatggttaagaaagccaagagagccatgacaaccacagctgatacaactactcaagccttggttgctgagtttctgcttggctttgaggatgtgttacaagatcttggcgagatccagaataatagtggt

SEQ ID NO: 5945 - DNA, 445 bp, Zea mays
  misc_feature (377)..(378): n is a, c, g, or t
  misc_feature (383)..(386): n is a, c, g, or t
gggatcatctcatttgaatcagttaactattgatccaaaatgcctctggtgtattgtttctattgttgattgttaatagcgtcccacacattcccccatcggtcataactatgtaaaagaaatgttcagctgttcattttttggagttgcatttaccttgatttttcatatgctaaaatgtcttcactggtcaggttttgtaagaaacctaataacctattacacaataccattgttacatggacaggggtgcgggtgtctttgtctagtttgagtttgggtgtctgatttggctttttttagacatggcaaataccacgtggaatctgacatagattttgggtaagagtgcaacactcacaattaggttcgtaccnngtcgnnnncacgggcagcactatgtggttctggcggaggacgccggcaggtacaaggagttgatgag

SEQ ID NO: 5946 - DNA, 395 bp, Zea mays
tcctccaaccggtcaaccggacttaccaaggcagctttcctgcgtctgcaggtcgagatttttgagtctagcaaagatgatagcagagaggcatcgcctgaatgttctatttgccttgatggattttacgatggagatgagctgataaggttgcgctgtgggcacaggttccactcgacatgcttggagccatgggcgcggaaatgtgcagactgcccatactgtcgaacgaacatacggtcacgatcctgacgacaaacccttagttcagagtaagcttataaccaccatggagtttcactgttgtaaaattcgctgttgtgggcatgccagttaatccggtgctcctatggcgacatgtaatctctaatatcctgaatattttgtgttgtgtc

SEQ ID NO: 5947 - DNA, 918 bp, Zea mays
gaagggccgtgggtttttcgacaaggagcctttccctcttaccagtaacgatctaattgagaaggtatgctttggcagcatatgccatagatgtaagcaagttattatgtactgtcagccaccggtcagtgaggatttttgttttgaaaatcatgtagcatgaatctcctgagccaccagttttgagttctagtgtttgttaagttaagaagattggattgtagcattcaccggttctgatttctgagtagtagtaattgttaggttgagaagatccagtggcaacaaactgaaataatctaaactgcaggctactcatcattttgtcagtaaggaactaggtaccagatgttatgagtactagtaatttgttaggttacgaagagccaataatacaaaataacaaaagttcaattcggacgattgagtcctgctcacctatcaccgacatatttttcttgtaaatccagtgatcagcgaaaagcaaactacccatgattaagcgttttttttctcatgatacgttttttgggtttaacgttttcttctggagtgagaaaacagagagttggttaaatcggcttatggagattttggactcagtttcaacttgtgcactgcactgaaaatctccttttgtgcccttgcctaaaacaggctcttggagatcacggcatcatatgcttggaagacgttgtgcacgagatcgccacggttgggccgcacttccgagaagcatcgaggttcctcatgcccttcaggctcaagtgtccggagaggaggctgcagatgaagaggaaaccctacaaggatggcggcgactcgggcgaccgtggcgacaagatcaacgaactaatcgagaagctgaactagaagcgcagaccttgcctcctccggctgtcgttttgcgttggagcg

SEQ ID NO: 5948 - DNA, 509 bp, Zea mays
gagaaacgatcaattgctttgtggggaaaacgagtttgatggatcatcaaggttgtatacgctagatcagactcgagccaaaacagaagagccaatgcatccttcaaatgtgaagatggctactactacaagacatactcctgggaatatgctgtgtgatagtttctcaggtgattatcagcttaggtcagggggggatgcatcgggatcagtccagcaagcacctaagtacagaagactatgcaaatatggtgacaagatcaaaagagtctcttccatatctttggatggctgtgatgataggtttgaagaatgcaatattgctaataaagataggccaaaccaaataaaacatgctatgggtgagctggttcttgcaacccttatagtcaatgttcaatattgttattttttttttcattttcttttttgtgtttgttggaacatatctttacatcttgttggatgttttgaacctcgtattctagggacaaaaaggaagaccaaga

SEQ ID NO: 5949 - DNA, 1298 bp, Zea mays
  misc_feature (625)..(626): n is a, c, g, or t
  misc_feature (629)..(631): n is a, c, g, or t
  misc_feature (633)..(633): n is a, c, g, or t
  misc_feature (656)..(657): n is a, c, g, or t
  misc_feature (659)..(665): n is a, c, g, or t
  misc_feature (667)..(675): n is a, c, g, or t
  misc_feature (677)..(677): n is a, c, g, or t
  misc_feature (679)..(697): n is a, c, g, or t
  misc_feature (699)..(699): n is a, c, g, or t
  misc_feature (703)..(709): n is a, c, g, or t
  misc_feature (720)..(721): n is a, c, g, or t
  misc_feature (725)..(750): n is a, c, g, or t
  misc_feature (756)..(757): n is a, c, g, or t
  misc_feature (763)..(767): n is a, c, g, or t
  misc_feature (771)..(775): n is a, c, g, or t
  misc_feature (786)..(788): n is a, c, g, or t
  misc_feature (792)..(802): n is a, c, g, or t
  misc_feature (804)..(806): n is a, c, g, or t
  misc_feature (809)..(809): n is a, c, g, or t
  misc_feature (814)..(817): n is a, c, g, or t
  misc_feature (828)..(837): n is a, c, g, or t
  misc_feature (842)..(853): n is a, c, g, or t
  misc_feature (861)..(871): n is a, c, g, or t
  misc_feature (873)..(878): n is a, c, g, or t
  misc_feature (882)..(882): n is a, c, g, or t
  misc_feature (887)..(887): n is a, c, g, or t
  misc_feature (891)..(916): n is a, c, g, or t
  misc_feature (922)..(924): n is a, c, g, or t
  misc_feature (934)..(941): n is a, c, g, or t
  misc_feature (952)..(957): n is a, c, g, or t
  misc_feature (960)..(966): n is a, c, g, or t
  misc_feature (971)..(975): n is a, c, g, or t
  misc_feature (977)..(994): n is a, c, g, or t
  misc_feature (996)..(1000): n is a, c, g, or t
  misc_feature (1002)..(1019): n is a, c, g, or t
  misc_feature (1022)..(1028): n is a, c, g, or t
  misc_feature (1031)..(1034): n is a, c, g, or t
  misc_feature (1039)..(1047): n is a, c, g, or t
  misc_feature (1054)..(1057): n is a, c, g, or t
  misc_feature (1064)..(1073): n is a, c, g, or t
  misc_feature (1075)..(1075): n is a, c, g, or t
  misc_feature (1077)..(1079): n is a, c, g, or t
  misc_feature (1084)..(1091): n is a, c, g, or t
  misc_feature (1093)..(1094): n is a, c, g, or t
  misc_feature (1097)..(1099): n is a, c, g, or t
  misc_feature (1102)..(1108): n is a, c, g, or t
  misc_feature (1113)..(1115): n is a, c, g, or t
  misc_feature (1117)..(1131): n is a, c, g, or t
  misc_feature (1133)..(1138): n is a, c, g, or t
  misc_feature (1140)..(1152): n is a, c, g, or t
  misc_feature (1157)..(1162): n is a, c, g, or t
  misc_feature (1164)..(1165): n is a, c, g, or t
  misc_feature (1167)..(1182): n is a, c, g, or t
  misc_feature (1184)..(1188): n is a, c, g, or t
  misc_feature (1192)..(1195): n is a, c, g, or t
  misc_feature (1198)..(1198): n is a, c, g, or t
  misc_feature (1206)..(1207): n is a, c, g, or t
  misc_feature (1213)..(1219): n is a, c, g, or t
  misc_feature (1222)..(1227): n is a, c, g, or t
  misc_feature (1231)..(1232): n is a, c, g, or t
  misc_feature (1236)..(1239): n is a, c, g, or t
  misc_feature (1243)..(1253): n is a, c, g, or t
  misc_feature (1258)..(1265): n is a, c, g, or t
  misc_feature (1269)..(1274): n is a, c, g, or t
  misc_feature (1277)..(1281): n is a, c, g, or t
  misc_feature (1286)..(1294): n is a, c, g, or t
gctgtcgtcgctctctggctgacgtccgtcatcgtcggcgccatcaactccgtgcctctggtacgtacatccgctcctctcctcccctcccccgtggctgtgcatgtccctcattctcaaattcaactgccagctagctaggagatgactggccagcacagcaagtacatgtaaagcccggtaaaagttcatgcttggtttggttcctgcagctccccaagatcatggagcttgtcggcctcggctacaccggatggttcgtctaccgctaccttctcttcaaggtacgatgcgcacggttctttgtacagtagcaccgaaccatatctgactgaataatttggaacatgcaaattagcctaccactaaaaatgctgttgggttaacatgccggcatctatctgttcactcgattgcaggaaagcaggaaagagctcgccgacgacatcgagtcgctcaagaaaaaaattgctgggacagagtaaaacatgttgttctcgtgaaactttttttggacgattctttcgggaacacgttgcctcttgtctagactccagatcagtgctacatgtctttgcactttttttttggtgccaaacctaaggccccccccccccggaaaacnnttnnncnacaaggaaaaacaacggggaccnntnnnnnnngnnnnnnnnncncnnnnnnnnnnnnnnnnnnntnttcnnnnnnncatcctattanncctnnnnnnnnnnnnnnnnnnnnnnnnnncccccnnccgagnnnnnatcnnnnnccccctccccnnncccnnnnnnnnnnncnnnggncctgnnnnccctcacgcannnnnnnnnnttatnnnnnnnnnnnncccaatcnnnnnnnnnnncnnnnnncttnctttnactnnnnnnnnnnnnnnnnnnnnnnnnnngccagnnnccttctgccnnnnnnnncccccaccccnnnnnncannnnnnnagccnnnnncnnnnnnnnnnnnnnnnnntnnnnngnnnnnnnnnnnnnnnnnntcnnnnnnntcnnnnccccnnnnnnnnnaattatnnnnatatttnnnnnnnnnncncnnncaccnnnnnnnncnncgnnncannnnnnnttttnnncnnnnnnnnnnnnnnntnnnnnncnnnnnnnnnnnnnccccnnnnnngnngnnnnnnnnnnnnnnnngnnnnnaatnnnnccntccccccnntcccannnnnnntcnnnnnnaaannatannnntagnnnnnnnnnnnaacannnnnnnnacannnnnntcnnnnncaccnnnnnnnnnccca

SEQ ID NO: 5950 - DNA, 590 bp, Zea mays
gttgcgaaaggcctgaggagcagcagatgcaagatcttgtggtacattccagttccagtttgttaaactaatattatcttttttttacttaatataacggcgagcagttctcctatgtgtttgaggagaaaaaaaacaatactattatatatcttttttgtgcttattctactatatgtgtaccatgatgaaagactttgcattccaactcttaactcgtgtttctcattataggctgctaccatagcggagaagagggcagaaacacaaatgttcctatcacttcctacggagagaaagcgaaggagaacagaccatagtttgttgatgcttgactcatttgtccctaaacaaagaagaagaaaaggtgacacaggtctagcaccagctgatttgtcattggatttacatcaaactgctacatcacaagaacctgacatagctatagaggaagaagagaaacgtaaaaatgatggtgatggtcttgaggattattggaaagattttgcattggctgttgaaagcacaaaggtatgagtatcaaccacagaatttgatttatattgcagcaccacatgaaaatctttttt

SEQ ID NO: 5951 - DNA, 518 bp, Zea mays
tacaaaagcattgccatgtagtaggagagaaatgctaatggtgctcactgtaatatcttgacaatgatgctacaaaacttgaactaaaattgaaactttgaagtggttgcagcaataagaaatataaaggaaatgagatacacacatcaaggagaagctatacaaaataacaaccttaaagaaaagaaataccttgattcctctatggcgaggtggctccagtacctccgatcatctatcccagtaatagtcattgcctttgatgatatactcatgcaaagggctcccttgttcttcagaatcgagaattcctaaaatagacagcatggatggctattaagcaaaatagacaatttcaagcaaacacgaggctaataacagaaccgcatccacaacagatcggccctaacaaacaagcataatacctccatggaggaatgaccaaatgagtttacctttctgtggcatcaaagagggtggatcggcacagacgagcgtaaatctccttcttggtcaaa

SEQ ID NO: 5952 - DNA, 395 bp, Zea mays
gcgaggaattcggtaaaatgggcgaaccaatgagcgtcgttaatttttttggtttccgagtcaaattactagttgtgctgatggatgtttttgcgtgtgagattggagaagggagatccccaaaattttatggatgaagaagaaaatgaagtcgaagagtgacgcttgcaagatgcttgacgaaaggcgtgaaccgtagattgatcactgttcctcaattgccgagttaaattttattgaggtgagtgattcgctgctcctgcataatagatcgaagcatggaatggtttagtatattaggtgtgataattttattgctatggttaggatgtgttgtgactgtattagatgtttgctgatgtatcatatatgcaatgtatgtttgaggaaagact

SEQ ID NO: 5953 - DNA, 716 bp, Zea mays
acatctccttgtaactgaaattgtattcagggtggaggctggtgcaatgatcgcagcagctgtgtgttccgcaagggcagtcgtcgtggatcatcaaatcacatggagaggcaactccagtttacagggatattgagtaacaaacctgaagagaatcccggtattgttcttagcaaacctgcctcgtggttctttttgtttttagatttctactgtgattttgttcacactaaaaaaaatctgttgattattagttatcatctgtggttgtgtgattgttattatattttctcttagatttctacaactggaatagagtgaaggtccggtactgtgatggtggatctttcactggtgatggctctgatgcggttagtgaaattctgtctcatgtcgccacattttgtttccttattagttcaggacacaaactaaatgtgcgtgccatgggatgcaactccaaaaatctatccttgctttgttttgtttactgaaccacaacaattcactgtctgatttccttctttttctttaggctgcaggcctttatttccgaggtcagcgcatttggcaggccgctatggatgacctaatggcccaaggaatgcgttatgctaatcaggtatttacacttaatttcccctactcttctgttactcatttttctttagcttttcagaggtcattttcatgtccctgatgcaatttatcgtata

SEQ ID NO: 5954 - DNA, 853 bp, Zea mays
  misc_feature (795)..(796): n is a, c, g, or t
gatgtttcttcacctgtagagtgcagtcgttatcaaaattccaggtacggaatattgatgaaaccccaaattttacagttcccaaaagaacaaaagaagttgaggtaatcagttgaagtttcatgtgcaattgtgaagaacatacctatcgatggtagattcttccctgtgtgatgtagccagagcagacgacagatcaatacaggatctacaactcatgcaacatccatgatctatgttcagactgacaccactattttgcaagagagatttggcgacattctccatatccatatcaaccttcgatacatcctaaaagaaactcagcatcatgtcatatgtgatccatcagcattaagtactcactccagtcacaagtgtcgttttgaagttatctcaagttaaccattcaaaattttgatcgtatactagtttttatatgttgagtttggatatttcaaaatagcacgagcagatttgtcagagttttcattaaatatagtttcataaaagtaaccaattttctttgattcataaatattttgtaacaaaaacagtactcaaagttgtgttttgaagatcatatcaatgtttaaaaggtcaattatttgtgactagagtaaatgagaagatattaaaaaccatggtaatgaaaataaccgtacgggcaatgatagtttgcagacataagatcctccaagggaaacattcacgaaattctctttggacctgtagtaagttgattccgatatggcaccaaggcagttgctttgtggacaacgagaatgaattaanngcaaggtctgataggtttagctctgaacaacttgaacattgacaactgaagtagtaa

SEQ ID NO: 5955 - DNA, 1204 bp, Zea mays
  misc_feature (1146)..(1148): n is a, c, g, or t
  misc_feature (1193)..(1193): n is a, c, g, or t
  misc_feature (1195)..(1200): n is a, c, g, or t
tttttggctaggtactttttcaacacagtatattcatctatagtagccgagtagcagtacctcttgttaatgcttaccaaggatgcaaacttgaactattgaagaggggggagatatacagaagaagatgccaaagctatcgttgtacagattttgagtgtagtgtccttctgtcatcttcagggagtagttcatcgtgatttgaagccagaggtatgcttgaaccacttcgtttatggcttgcatatatgtgcagttcagtacttcagtaggtgtttgactggggttagttctgccatcttattcaatagcacttgctgttttttgtatttaattgacagcaataatgcttgttttgaaagctaggctgcctttgtgacgtagttgctatatttcattggcacagaattttcttttcgcaacaagagatgaaagtgctcctatgaagttaattgactttggtctgtctgattttattagaccaggtaatgtactaatatttatctcttttacacggctcacatggttatttctgctcttgtaattaaaagtcattactttgttcaaaagtacatttctcagttagtcagtcagcagcttaaaaacattgattgctaataaaacctgggtttaggtgaacttcttacaacagaaatcaggcaatacagtgttagtttcaggatattttttgctgtatactcagtctcgaggatttcattacgcaagtttgaaccggatgtgcattttattatggttttgcttttccatacctttgttcatacttcatagtgtgccccagttagctcttatgctgtacaaacagatgtttgtcataggctgcattttgatgatttgcttattagtcttgcattttaattgtttagcttgtgcatacatgctaggatcatcctgtgtgttgactttgtttttgcatctttctttatgtttggaacttggaagacactatcattatttacagttaaccatttcttttgctcattcattaactcaatcttatacttaatcttatatgttctgtgctacatattgcagatgaaaggctcaatgatattgttggaagcgcatattatgtcgctccagaggttctacacagatcgtacagtatggaagcagacatttggagtnnnggtgtcataacatacattctgctctgtggcagtcggccatttggncnnnnnngtca

SEQ ID NO: 5956 - DNA, 1451 bp, Zea mays
  misc_feature (1447)..(1447): n is a, c, g, or t
atggtatgcatgttaatgagttcgttccatcttgtgtctgctctagtctcactaaatagtgccttgaagtcagagaaataatacagactggctagaaaggcaatcccatgtcctcagtttgatgggtaaacttcattgtctggcctaggctttagtgttctaaccatagtgctgcatcctggaagataacaagacagttacttttagcaccgttgttcacgtgttaacaagaacaagaggggctggcatctagtgagctcgtgtgcaacaggtcaacatgtacgtcccggttaaaaattattacttgaagaatgacttgttgtctagcgttgaattgaacacgttcgtctttaaatgcaatccattcattttacacgtttcctttaacagtacaacaatgtgttggaattgtgaaatggtttcaaagcactcctatattcagacagggaataggacctggtctgacagtcatgtcatcaattaatcatcattggaaacaacctacagcatgatgtattccgtttgttctactggttagtgctattatttttcatgatgtctgttacacttaacaaaaggtcatctttttgtacaggatgtgttgtttgtggacagtggcgatccatgggaccccaatcctacaacagtggaaaacgtgatgaaaatgcttaatggtatccacagggttttgaagccagaaggcatctttgtatcaattgcctttggacaggttagggagatttaccaacagtctttttttcagagttcttttgggtttgctttacctatttacagtatataaatgtctccattacgtgggaatgtggtttctttttgaatgaaaccacttttctctcagaactatgtgccgcaccattgctactggaagatgatattgtgaaatagttaaagactgtctttcctatatgattaaataaataagtaaagatggaaaagaggatctaaactggaggcagagttgatgtcttattatttttcttatctattgatcttctcttctcaatgaagttctacttttcatatgtcagccacactttcgacgccgattttttgaagctcctgagttaacatggtctattgagtacagtacctttggcgacagcttccattatttcttctacactcttaagaaggttagttatgttcatttccttcgatctcactcgagcctatcagtttatcttgaatatttgcctcatacgaattatgattcttccattatacaagttttttcattgctgcaaccactttgtccctagcgaaaagctatcttcttaattatttgccttttcttaaactctagggcaagaggtcactggagtccagcagttaccaaaacacattaccatcacctgttgctccaagaataaatatggtccacgaagagctcgagagcgaggattttatattcctcacaaacctgagngtgg

SEQ ID NO: 5957 - DNA, 588 bp, Zea mays
aaatgctagaggaggtcaacaggtaaataatacaatgatatttaccgtgatatatattgcttgattggatacagcttctatttaccggtcctgcatgcagaatcctcaaggaaaatggtgtctacatgctggtaacctgaactatttgattctttattctttaaaagatgtggttattttgtgctcatctggtgtctttaacaaatttctgactcctataatgtcttagatcacttatggggatccaagttaccgcttgcgtctcttgaaggacatggaaaaatggacagtaaagctccatgtcataggttagttagttactcaccatcaggccaattcaactgcaccttccggtatttgcagagctccaatcacattgaccttttctcatatccaaagtaacgtttagattcatgaatgtattccagagtagctatgttttcatttttcatggtaaaatgcttgtgcttacaactgtaagtgtactgggttattgcagaaagatgggagaaaagttcgaatcagaacaaatgggaactgacaaagccattgcctctagaggaccatagcacatcactagcctgcact

SEQ ID NO: 5958 - DNA, 1095 bp, Zea mays
  misc_feature (20)..(21): n is a, c, g, or t
catgcagtgcagggccagcnnggagaggatctattccactggcaggccacaatcatgggttctagcgacagcccctatgcaggaggggttttctttgttaatatccattttcctcctgactacccgtttaagcctccaaaagtgaacttccaaacaaaagtgagctggtcttattaatttgatttccttcgcttttgatattcctttattctgcaaaagtatttgaacctctattatgttgccaatagccatggttacggatgaccttttatttttggcatactaggcaataggagtgatctgaagttcgtaatgaaaaggcccccattccaaaatcataccaaaattgttaaaactttgttctctgttatgcaaaataaaacatgctcaggttcttctctacatcaatcaccattttattttcaaaacttttgtttttcttcctgatgtgaagtaaatagttaagatcatgctgaatccttaagtacttgttcctcgtaataaacccatttcacttgcttcggcagtttcatagagttatttttcttcctgaaatttggttctagtgatgcttgaaaggcaatggataagttgtcatggggcagagctcaaacatgagtacttgctagcatcctgaagttgagacatgaaagtgtcagtcactcagtctgttagcaattgttcaaagtctggttctgtcaaaccatttatccttcttgcaactaattcagctcactgtctcactgaaaacgtacaggtttatcacccgaacatcaactctaacgggagcatctgccttgatatcctcaaggagcagtggagccctgcactgaccatatcaaaggtcctcctctccatcagctcgcttctgactgaccccaacccagacgaccccctcgtccccgagatcgcccacatgtacaagaaccagaggccgcgctacgaggaaaccgcacgggcctggacccagaagtacgcgatgggctagctgattctgtctcgccgaacaatactgtcactgcgaagaagatcatcatcacaatgttgtaagaaattaagttgaaccggtttccccgtcgtgtgatggtattaaga

SEQ ID NO: 5959 - DNA, 370 bp, Zea mays
gcagatgcagcaaggatcgtggatgagatggaaaccgctggggtgcagccaaatgaggatgcatactctgtggatactctgtggtggtcaaagccactgcaaggagggaaaatccacataggcgtgtgatttagtgagggagatgctagaggcaggtgacagggaaatgtgccatggagccatttctacctgttttggtgattaagtgctcaacacaccatcttgaactatcttcacatgagcatgagcacatgtttacataaaggcaagttgaagagatcaagtccaaatgagctaatctggagggccaaaagtgcaactttgggcaacacaacataaacatgaggtttaagcgtttgaataagttgcg

SEQ ID NO: 5960 - DNA, 378 bp, Zea mays
ggcccccagccaggctgctctcaacgacgagggtgtcgacctgcccagatgggtgcagtcagttaaccgctcggagtggggttcactagtgtttgatatggagctcatgagacatcagactggtgaggagcccatggctcagctcgtgctgcttgctatggactgcacagcacaagtcccagaagcccggccgtcaatggcgcatgttgtcatgcggatagaggagatcaagaagtcaagcgtgaccccgaacattgaacaagttgatgatcaatcttcaagggctgaatcggaggcggcgccgaccaatccgtttgctacttgatatgagttgacctgagagagagagaatctgctataactctagcctgcattcaa

SEQ ID NO: 5961 - DNA, 918 bp, Zea mays
tggataagtagacaaggtaaagcaattgtaaaattttgtagtctccttttgcacctttggatacaactgatttaaacagttcgttttggcaggaaagtgagagggctgtcacgaaaaaggagggaattgaatttgccagggaatacggttgtttgtttctagaatgcagtgcgaaaacaaaagtaaacgtagaacagtgttttgaggaactggttctaaaggtatgtatatatattttcgcagtaccatgtatgccgccttattcttgacaatattccaagctgcacatacctgcaaatcgactattgagatttagggggtgtttggtttctagggacaaaattttagtctctccattttattccattttagtttctaaattatcaaatacggaaactaaaatagacatttggcagtttagggaataaaatagtgggactaaaaataagagggtgtttgaatgcactagagctgatagttagtagctaaaattagttggagacatccaaacaccatagctaatagttcaactattagctattcgttagttagctaatttcactagtaattttttagccagctaaatattagctctagtgcattcaaacaacaccttagtctctagaaaccaaacacccccttaaatggggaaggaagcagatagataagatccttgttatttatagtattggcctgtatgcacgttgcagatcttagacacgccaagcctcctggcggatgcttcctcagcaggggtcagcaagaagaacatcttcaagcagaaggctccagaagctgacgccgccacaggcagctgctgttaacatggttttggtcctgtatattgctatatgtggtgaagacaattggcagcagctatataatgatgtatcaagttaaacttacctgacaatatgt

SEQ ID NO: 5962 - DNA, 387 bp, Zea mays
  misc_feature (376)..(383): n is a, c, g, or t
gatggttcccagataatgggcatattgtcttcactccgaattttctcttcaaccatcttttcaacgacctccagcattacactagaatacttgtctaccgtttttcctatgtattcttctgcagaaagagctctagtgctttggcccatttctcctaaccttccattttccgagtagccccaaccaaatagctttccatcctttgtcagtgccatggcatgtccccatccaaatgatacctaacgttattccttcagttaacgtcattgccaatcaatttattaaatttctgtgagaaaattagcaccttaacaatgtcgtagctagcaagagctttcactttagatggcactgctgcctctacaatgtccttccnnnnnnnnaagt

SEQ ID NO: 5963 - DNA, 390 bp, Zea mays
acgaatcgacctcgaagctggtggtgcacctgtccaagccctgcgaggtgagcttcaaggattcctccaccgtaaggtatgctcctcgtgtcaaggcgactctgtcccgaggcaagctttccggggttgaaggcatgaagaccaaggtggtggtatgggtgaaggtggccagcgtgagcatcgagagctacaagtctgacaagatatgcttcatcgccggtgtgaagaagctgaggccgaaggatgcttatgaggtccctcgtgaagccatctctgtcgaggagttctgagctcaactcaactccattggtttgcctagttgccttatactacgtagtatcattcattcgtagcatttttcgggtcccatgtgatcggcgattgatgtgc

SEQ ID NO: 5964 - DNA, 1115 bp, Zea mays
  misc_feature (510)..(541): n is a, c, g, or t
  misc_feature (547)..(549): n is a, c, g, or t
  misc_feature (556)..(562): n is a, c, g, or t
  misc_feature (568)..(573): n is a, c, g, or t
  misc_feature (575)..(577): n is a, c, g, or t
  misc_feature (579)..(579): n is a, c, g, or t
  misc_feature (600)..(608): n is a, c, g, or t
  misc_feature (610)..(612): n is a, c, g, or t
  misc_feature (617)..(621): n is a, c, g, or t
  misc_feature (623)..(623): n is a, c, g, or t
  misc_feature (627)..(631): n is a, c, g, or t
  misc_feature (634)..(635): n is a, c, g, or t
  misc_feature (637)..(640): n is a, c, g, or t
  misc_feature (642)..(644): n is a, c, g, or t
  misc_feature (646)..(666): n is a, c, g, or t
  misc_feature (673)..(676): n is a, c, g, or t
  misc_feature (682)..(686): n is a, c, g, or t
  misc_feature (693)..(695): n is a, c, g, or t
  misc_feature (698)..(699): n is a, c, g, or t
  misc_feature (707)..(709): n is a, c, g, or t
  misc_feature (711)..(722): n is a, c, g, or t
  misc_feature (724)..(726): n is a, c, g, or t
  misc_feature (728)..(730): n is a, c, g, or t
  misc_feature (739)..(739): n is a, c, g, or t
  misc_feature (746)..(750): n is a, c, g, or t
  misc_feature (753)..(753): n is a, c, g, or t
  misc_feature (757)..(758): n is a, c, g, or t
  misc_feature (760)..(760): n is a, c, g, or t
  misc_feature (764)..(766): n is a, c, g, or t
  misc_feature (768)..(772): n is a, c, g, or t
  misc_feature (782)..(785): n is a, c, g, or t
  misc_feature (787)..(790): n is a, c, g, or t
  misc_feature (792)..(795): n is a, c, g, or t
  misc_feature (800)..(811): n is a, c, g, or t
  misc_feature (818)..(820): n is a, c, g, or t
  misc_feature (822)..(825): n is a, c, g, or t
  misc_feature (832)..(838): n is a, c, g, or t
  misc_feature (841)..(843): n is a, c, g, or t
  misc_feature (846)..(847): n is a, c, g, or t
  misc_feature (849)..(857): n is a, c, g, or t
  misc_feature (861)..(865): n is a, c, g, or t
  misc_feature (867)..(870): n is a, c, g, or t
  misc_feature (874)..(879): n is a, c, g, or t
  misc_feature (881)..(890): n is a, c, g, or t
  misc_feature (893)..(909): n is a, c, g, or t
  misc_feature (916)..(924): n is a, c, g, or t
  misc_feature (926)..(926): n is a, c, g, or t
  misc_feature (929)..(938): n is a, c, g, or t
  misc_feature (942)..(943): n is a, c, g, or t
  misc_feature (949)..(956): n is a, c, g, or t
  misc_feature (958)..(965): n is a, c, g, or t
  misc_feature (967)..(967): n is a, c, g, or t
  misc_feature (969)..(976): n is a, c, g, or t
  misc_feature (978)..(985): n is a, c, g, or t
  misc_feature (988)..(989): n is a, c, g, or t
  misc_feature (993)..(1003): n is a, c, g, or t
  misc_feature (1010)..(1013): n is a, c, g, or t
  misc_feature (1016)..(1019): n is a, c, g, or t
  misc_feature (1022)..(1030): n is a, c, g, or t
  misc_feature (1032)..(1045): n is a, c, g, or t
  misc_feature (1048)..(1048): n is a, c, g, or t
  misc_feature (1050)..(1050): n is a, c, g, or t
  misc_feature (1052)..(1059): n is a, c, g, or t
  misc_feature (1062)..(1069): n is a, c, g, or t
  misc_feature (1072)..(1086): n is a, c, g, or t
  misc_feature (1089)..(1090): n is a, c, g, or t
  misc_feature (1092)..(1096): n is a, c, g, or t
  misc_feature (1101)..(1108): n is a, c, g, or t
cccctgcacgtacccgacgtaccagccgaaggagcggaggacgtccaagtacgagagcaggcggtacgagaggcggagagatgggccaccggcggccagcaggaaaccgaggcagcaggcaccagctcagactcagaccgagtcggcgtcttcgtgacgaggtgcacagtgcattgcaacttgcaagacgcagtctgaatctctaaccgtgtgttgaggacttgagattggttgtgtactttttaaccccggtgcttctttgtatcagctctgcaggcattttgtccacgtacctacctacctagaagtagaacaagagaggaggacgcctaaaattctgtcgcattgggcaccgcgtactggactggacaggcgggtcgggatccatcatccatcgtcagccagaaaaattgtcgctgtccaagcagcctgggcagcttgtgtgtgactgtgctgataagcctgatatcttgagctagctgtggcagaaactggaaaccctactgtgannnnnnnnnnnnnnnnnnnnnnnnnnnnnnnntactannnttttcannnnnnnaatatnnnnnntnnncncctcacattaacattccatannnnnnnnncnnnattcnnnnngncatnnnnnacnncnnnnannntnnnnnnnnnnnnnnnnnnnnntctatcnnnnaacatnnnnncctaccnnnaannaacccttnnntnnnnnnnnnnnncnnntnnntcatttacntttcccnnnnnatntccnntncttnnntnnnnnaattcctaannnncnnnnannnntttcnnnnnnnnnnnnaaccacnnntnnnnctccccnnnnnnnacnnnccnnannnnnnnnntccnnnnntnnnnaccnnnnnncnnnnnnnnnntcnnnnnnnnnnnnnnnnnttcatcnnnnnnnnntntcnnnnnnnnnncttnntcttannnnnnnntnnnnnnnntncnnnnnnnncnnnnnnnncanncccnnnnnnnnnnnccccccnnnnccnnnnacnnnnnnnnnannnnnnnnnnnnnnttnancnnnnnnnnctnnnnnnnnccnnnnnnnnnnnnnnnctnncnnnnnccatnnnnnnnnattaccc

SEQ ID NO: 5965 - DNA, 395 bp, Zea mays
gcatcaaaaaccaagatagttagggacaaagtcttacgggcgatgggcaaaacattggagcttggcgaagactatttcatcagccagattggtgacagggcctcagcaattgctaggttcaactactaccctccctgtccaaggcccgatcttgtctttggcattaagcctcactctgacggtggcgcggtgacgatacttctcgtcgacaaggatgttgggggcctgcaagttcagaaagatggcgtttggtacactgttccgtccatgcctcacacgctgcttgtcaacttgggtgactccatggaggtaggttgggtatctccatgtcccaaagcgctttctctcacttgaatcttcatagattcagttaacagaaacaaagcgagtcagtg

SEQ ID NO: 5966 - DNA, 1041 bp, Zea mays
  misc_feature (1035)..(1038): n is a, c, g, or t
ccatcgatcagagggcccggcgctgttgcctttcgcattcgattcctttcgggtcggatttgtggcggagctcttgatttgctccgtccctgccagcggaggagggcttgctggatcagggatcgagcaaggaagcagccatgagcggcggcggaagcgtgagtttcctcgagatccagccgtcggagctcgcattcccctgtaagttctcccagatctcgtatctaggctgtttggatcatgttgggatgctgacgtaactgttccttttattggatcttggtcaaagctgtgatcttggtagggaaacatggtcggcgatcctccctaggtggacttgctaccccctactcagcttggttcgtggagtgggttgtagaatcgtgccttcttgtagcagtaggttccgcccatcattcgaatgacgtgtgctagtatttgtgtgccgatctgttcgtctgctgggggtttgagtgggccagatttgtttgtttcttggtgcacgcttccggtgtgcattgtgtgtggtgagtggtgagtggtgactcgtcgttttggtagttatttggcctttccggggctttgggatctagtacaaaagattgcgttgtaactgtattggtgtgcgctgtttgttttcgtgtggtagcgtgaaatgaaatttgcctgtatatttggcgccgcttttgactctggtcattgtctgcctgcttagcttgaaataactgcaatgcgttataggtctttcaattgactatacagtaggttaaactgtcctgctatgtgcctgaactgttttttatttttgtttgtacatgacagttgagataatgaggcagagctcgtgttccatgcaactgaccaataagactgaccattatgtagcattcaaggtaactattgttcaatgtcacttttcatgctccaagagtccaagatattcacttggatagattgcactgtagacacaaatcttatatcttatctgtgatttgtaggtcaaaacaaccaacccaaagcagtactgtgtgcgtnnnnaat

SEQ ID NO: 5967 - DNA, 1305 bp, Zea mays
  misc_feature (51)..(52): n is a, c, g, or t
  misc_feature (757)..(757): n is a, c, g, or t
  misc_feature (763)..(763): n is a, c, g, or t
  misc_feature (787)..(787): n is a, c, g, or t
  misc_feature (796)..(796): n is a, c, g, or t
  misc_feature (882)..(882): n is a, c, g, or t
  misc_feature (946)..(946): n is a, c, g, or t
  misc_feature (972)..(972): n is a, c, g, or t
  misc_feature (976)..(976): n is a, c, g, or t
  misc_feature (987)..(988): n is a, c, g, or t
  misc_feature (1005)..(1008): n is a, c, g, or t
  misc_feature (1012)..(1012): n is a, c, g, or t
  misc_feature (1015)..(1015): n is a, c, g, or t
  misc_feature (1019)..(1019): n is a, c, g, or t
  misc_feature (1030)..(1031): n is a, c, g, or t
  misc_feature (1040)..(1040): n is a, c, g, or t
  misc_feature (1042)..(1043): n is a, c, g, or t
  misc_feature (1045)..(1045): n is a, c, g, or t
  misc_feature (1047)..(1050): n is a, c, g, or t
  misc_feature (1060)..(1060): n is a, c, g, or t
  misc_feature (1062)..(1062): n is a, c, g, or t
  misc_feature (1065)..(1065): n is a, c, g, or t
  misc_feature (1070)..(1079): n is a, c, g, or t
  misc_feature (1088)..(1088): n is a, c, g, or t
  misc_feature (1109)..(1110): n is a, c, g, or t
  misc_feature (1121)..(1121): n is a, c, g, or t
  misc_feature (1130)..(1133): n is a, c, g, or t
  misc_feature (1169)..(1169): n is a, c, g, or t
  misc_feature (1175)..(1175): n is a, c, g, or t
  misc_feature (1178)..(1178): n is a, c, g, or t
  misc_feature (1190)..(1192): n is a, c, g, or t
  misc_feature (1214)..(1214): n is a, c, g, or t
  misc_feature (1218)..(1218): n is a, c, g, or t
  misc_feature (1233)..(1233): n is a, c, g, or t
  misc_feature (1240)..(1249): n is a, c, g, or t
  misc_feature (1253)..(1257): n is a, c, g, or t
  misc_feature (1267)..(1268): n is a, c, g, or t
  misc_feature (1280)..(1292): n is a, c, g, or t
gggagagaaatcaataacggcgttgacatacccagtatggaattcatgatnnaaggtctaacaacacatcatgtgcctagtgaggacatggcacttgttttatacaaaccagtagataattccgcaccatttggtcgtggcatctcaagttcttcattcatagtgagttcagacttgatacgtggtctaaagagtaagtacatcgtgatcaaccttctttagtcaccgtttatatttaaattcaccattcctacgagtctttgctattttggtcctgcattttgttagggggcttgctgaaatcagtgtgcctgaattttagttattgcatatattttatattaaaattgcagattcagagaacaaaaaaaatgtaggcataatctgcaattttcaactctgagaacaaaaaacctgctaagcaaaatcacaaatccgacaaaatctgatccatgttggtacaaagacaattatcaattatctctagtcaaataaggacaaaaaaatgattggttttgatacaaagaatcataaatcataaaaacaacaatttacttatactagttggttgtataaaagtgatgcctaaaatcatttaaaaattcaggcacctgaaatattgaagtgttttgttagattttgaagtgtcaaatgcatgtccagaacttgtatgactacaggtattatcggtacctaagtatttgggtgttgcttgtgcaaatataaactaacctacttagatttttatgttagcttntatatntatgacatgtccaaacctatctcntgatgcagntagttggtgaataaacaggaagcatgaaatgcctgttggcctaggggctaggggcatgagatgatttgtttagccatggcatcacntgcttacattgtgatttgtgtgggtgaacacttggtgtgcccttttctagtgctgtagttgtgnctgcattctttggtgtgcagaatatntganccatgtcatgnnttttaacgtgatttacnnnncaangantatnttattttgttnnctttggttntnntntnnnntagagctttngncantggcnnnnnnnnnngtcaccttnacatgcagcatttttttccanntatacatgttntgaattacnnnnaacccaattttttgttgactgttcttacttttcagnccatgnttncaatcaagcgannnatcatgtggtggaggatgaatntccngaacgtaggaacagnttggctnnnnnnnnnnggannnnnccacaagttnntataagatctgnnnnnnnnnnnnngccagagcgcaca

SEQ ID NO: 5968 - DNA, 577 bp, Zea mays
cttatctaagaaaattatggtatgtagttatgttcagttatagctcatgcaaatctctaatgaaaactaatttaactcttctgtgtctatcttccaggttggaagtttggaggatgtcctgaagaaaatggaggtaggatggatataaaatggcagaatggatattgcttgtacagttgtactagttcagcagctcttaccattatgctatttgattctgcagataaatgaaagagattctggctgggatgatttgatctttataccccctgggaagagcctcaaccaacatatcaatgaggtatcagcgtgattttgttccacggtgatagctcagagtttgagcagactattcacttcaaatgctatgatggtcagccaaacgaaatatcaaattgctgcctgagctttttctttggatagctattttcatggtcagctttgtcagggaaaattaactaaagtgatagaatatggctgtgaaacaattttcttgttgcttcgattcacaaaattaacacaggttacacaagaagatttgatgaagagaaagttgcgacattggtaaatcacctta

SEQ ID NO: 5969 - DNA, 373 bp, Zea mays
agctgttgcggaaccggtgggagatgtagctgctgcggaacacgaaaggtattatgccaatctgtttttgcttttcctaatatatatgaacatggatgaatcacaagcaacttcctaatatatatgaacgcaaatgaagttttgcattatttaagttttaatcaaggaaatggtccaagggtgcatcactggaataagctcgagaccacaagtgtcatatctcctctaatctttactctctcaggtatatgcatgcttggcattgtcttaatttatttatcacttctaaactaagaatacgttaagctcttcatattttgttgtttatcctaatttgtctccattcggcttcatagtctggtgtctatcaaaa

SEQ ID NO: 5970 - DNA, 1335 bp, Zea mays
  misc_feature (770)..(771): n is a, c, g, or t
  misc_feature (773)..(774): n is a, c, g, or t
  misc_feature (777)..(805): n is a, c, g, or t
  misc_feature (810)..(810): n is a, c, g, or t
  misc_feature (821)..(833): n is a, c, g, or t
  misc_feature (836)..(842): n is a, c, g, or t
  misc_feature (849)..(873): n is a, c, g, or t
  misc_feature (875)..(877): n is a, c, g, or t
  misc_feature (879)..(889): n is a, c, g, or t
  misc_feature (894)..(894): n is a, c, g, or t
  misc_feature (897)..(897): n is a, c, g, or t
  misc_feature (899)..(902): n is a, c, g, or t
  misc_feature (904)..(906): n is a, c, g, or t
  misc_feature (909)..(912): n is a, c, g, or t
  misc_feature (914)..(914): n is a, c, g, or t
  misc_feature (916)..(921): n is a, c, g, or t
  misc_feature (927)..(941): n is a, c, g, or t
  misc_feature (943)..(954): n is a, c, g, or t
  misc_feature (958)..(964): n is a, c, g, or t
  misc_feature (969)..(977): n is a, c, g, or t
  misc_feature (979)..(996): n is a, c, g, or t
  misc_feature (999)..(1004): n is a, c, g, or t
  misc_feature (1006)..(1008): n is a, c, g, or t
  misc_feature (1015)..(1018): n is a, c, g, or t
  misc_feature (1020)..(1022): n is a, c, g, or t
  misc_feature (1026)..(1027): n is a, c, g, or t
  misc_feature (1032)..(1043): n is a, c, g, or t
  misc_feature (1048)..(1056): n is a, c, g, or t
  misc_feature (1059)..(1060): n is a, c, g, or t
  misc_feature (1062)..(1064): n is a, c, g, or t
  misc_feature (1066)..(1066): n is a, c, g, or t
  misc_feature (1069)..(1083): n is a, c, g, or t
  misc_feature (1091)..(1091): n is a, c, g, or t
  misc_feature (1094)..(1113): n is a, c, g, or t
  misc_feature (1115)..(1120): n is a, c, g, or t
  misc_feature (1122)..(1129): n is a, c, g, or t
  misc_feature (1133)..(1136): n is a, c, g, or t
  misc_feature (1140)..(1155): n is a, c, g, or t
  misc_feature (1157)..(1172): n is a, c, g, or t
  misc_feature (1174)..(1178): n is a, c, g, or t
  misc_feature (1182)..(1189): n is a, c, g, or t
  misc_feature (1191)..(1191): n is a, c, g, or t
  misc_feature (1193)..(1207): n is a, c, g, or t
  misc_feature (1213)..(1225): n is a, c, g, or t
  misc_feature (1228)..(1231): n is a, c, g, or t
  misc_feature (1233)..(1233): n is a, c, g, or t
  misc_feature (1235)..(1244): n is a, c, g, or t
  misc_feature (1246)..(1248): n is a, c, g, or t
  misc_feature (1250)..(1260): n is a, c, g, or t
  misc_feature (1262)..(1270): n is a, c, g, or t
  misc_feature (1273)..(1287): n is a, c, g, or t
  misc_feature (1289)..(1289): n is a, c, g, or t
  misc_feature (1293)..(1293): n is a, c, g, or t
  misc_feature (1295)..(1303): n is a, c, g, or t
  misc_feature (1305)..(1328): n is a, c, g, or t
  misc_feature (1330)..(1331): n is a, c, g, or t
atcaagaagcgggtcacttgatgaagtcttcattcctttccactctttcttccgcttcttggagctagatgatgttgagtcaacagaacgccttggtgtctctacagatgtcatatcctctccattctattcatcattagcatttacacgaactaactcttcttccaagttttgaacagcatctgtcatgtcttccgcaccttcacctgtggccatgtccttggaatataccattgagagttcatcatagtaaggaaaggagactccatacaacccttttgcatctggattattctgtgaaataaaaaatctgatcagaccaacaaatacagaaagcagaaagcaagccagaaagcaagccagacgtcatgtgaaaagctgcctagctcgatacaagtagcgtgtgtgcgtgtttttctaatcctcctgaactaacattttttatttaaagtgtacacagcgacatgagccaaatgagcagctttcatgattattagatccagacagcatcagggctccgtgtgggaataatagcacctgcaatcattcacagggaccgggcataggtacgtcatgtgaaataatagcaggctgcagtaggataagaaaaaaagatgaatgtaggcttcctatgtgaacccactcttgttcaacatgtgaacaatgtgaaaaaaaggggctgatcaattataaagcagctgttaaatggctgaaaagtaccttgcaatgtgtctcatattgttgtttctcgcactgaatcatcttctggnncnnatnnnnnnnnnnnnnnnnnnnnnnnnnnnnncccgnactgaatcctnnnnnnnnnnnnngannnnnnnaaagcannnnnnnnnnnnnnnnnnnnnnnnntnnntnnnnnnnnnnntcccnccncnnnncnnnccnnnncncnnnnnncacaannnnnnnnnnnnnnncnnnnnnnnnnnngcannnnnnnaaacnnnnnnnnnannnnnnnnnnnnnnnnnnacnnnnnncnnnacatacnnnntnnnactnnaaatnnnnnnnnnnnncctannnnnnnnnagnncnnncnacnnnnnnnnnnnnnnnattttacnaannnnnnnnnnnnnnnnnnnntnnnnnncnnnnnnnnctannnnatcnnnnnnnnnnnnnnnntnnnnnnnnnnnnnnnntnnnnnatcnnnnnnnntnannnnnnnnnnnnnnngcatcnnnnnnnnnnnnncannnncncnnnnnnnnnntnnncnnnnnnnnnnnannnnnnnnntannnnnnnnnnnnnnncnccgncnnnnnnnnncnnnnnnnnnnnnnnnnnnnnnnnnannaacc

SEQ ID NO: 5971 - DNA, 951 bp, Zea mays
  misc_feature (938)..(938): n is a, c, g, or t
  misc_feature (941)..(943): n is a, c, g, or t
  misc_feature (946)..(948): n is a, c, g, or t
gagcgccaacggcacttctgtggctgacaagcgcttcaagacattgccgacgagtgagatgctaccgaggaatgaagtccttggtggatacatctttgtctgcaacaacgataccatgcaggaggatctcaagaggcagctttttggtatgttatcccgtcccttttagaaatcaaatgataactgttctggattttttttaaaaaaaaatatatagttttgatgccagtgtgtaattcgataatggtatctcaagatctattgctcttctgcaggtttgccagcaagatatcgtgattcagtccgagcaatcactcctggcttgcctcttttcctctataactacacaacccaccagcttcatggggtatttgaggtgtgtgattggttatctgatttcctgattcctgcaaagcctatctcaagttgttaaacacttgttcgtttgtcatacaaaagatacttttgagctaaaaaaattgtgcaccttagaaatgatgttgagcattcgttcattattaccattctagatagactgctcactgctcgtgtcgttatatgtaacttcttaccagtaataagaaacatccatctattacagcaaatgcatcgaagaggcttgattacatgttttgtttgatgacttgtagcctcacatgtgatttagttggtttcagtaaataaaatgttgtactttggtttccacacatttgtatttttcatatggaagttttgaattccaatcacacttaagtataaatctaaggaccttttatcttttggttttgaaacgaatctgcttaggctgccagtttcggtgggtccaatatcgatcctactgcatgggaggataagaagtgtaaaggtgaatctagattcccagcgcaggtactggtaacatcatttgtcattacgttcattcctcatttccttttgantcnnngcnnntga

SEQ ID NO: 5972 - DNA, 500 bp, Zea mays
ggtgtaagcttagatgcattggtgggaatatttacccgactaggtagagacatggaggagattggcgttagcaaaagctataaattggctgaaaaagttgcatctataatggaagaggcacaacctcttcttacacgggtacattccttcttccaacttttttccctaattgtttgcaaaattataatttagttaccttgttcgaatgcatgtgcaaccagtttctttcagccagtaccgctaaggttgcgtgtttcaaatgccttgtattcccttggcacactactagatattccaaataccagcatgctacctctgcaatcagcaatggctcataccttagtcttagtgatcgctgaaatgttgtagaacagttccactatgcaacatatgttccccgcatgtttatctgtctctgcttttatgagtaatggtcaggaggaggggatctccacttagttggagcgtggtattaggttcttcttcctcttttgtgtgtg

SEQ ID NO: 5973 - DNA, 356 bp, Zea mays
gctcctcgcctcctcctctcccgagtcccgaacggccgatcccgacgccggctgcgtggctcgcctcagagccccagccgtatcctgccacccttgtccatgagcgcccgctatcagcgcagctagtccctccctccgcccgctatcttgagcggtggtgatggagtttactttcgaggatgcagcggaactgtgcgcgctcgtttcgaatcagcaatcccacgtcgacgagaagcggaggtcgatgtggtttcttctaccggcgcacctccgatcagaatgcatttctgtttttgcaccctgcatcacaaaagattcggggccctcttaatttgcaggtggctggagtcaatgat

SEQ ID NO: 5974 - DNA, 1070 bp, Zea mays
ttcgagggtgcagcaacatttcagtgacgagttctcctgttggctcttggtgcgcgccatgagtttgggtcagcttggtctccctagttccatgagtaatatcggatctaatccttttactcttctataacctttttgcttttcttttgtttcttttttctgttttggctatggatgtaagtcctgttttctctctctctaatataaagatgtgcagctctcctgcgcgttctagaaaaaatgaatgtaaaatttgatcttcaattgtttattggcccattataaaattgtacaaagcttctccaaatatgccaattgatccattacaattgtttcataactactgtttatggattttgggactgcagaactgatggattctaacagatgtaacagacctacagtagggatgctaggccaaggagttaaaatatatccacatgttagaatatttcgtaactgtagtaacttcaacattatatagattaatcatgaacttttagttgtattaaacaaataagctctgtatgttcattgttgtagaactaagtttattgtgaatttgtgaacacatatatttgttcatgaaactgcattggatttggactaacaaagtttgtgtatgtgatatgtttttagtctggatctgcccttggtcaagattcaaatatggcttctgcagggttggctcgggtgggtgagtggtgcgactcgtcctctcatgaggctcgtcaccttgagcaacatgccgatcctgcagcagctgcacctggaggaggagctcctgcgccgcacatcggacaactggtgtgtcatcaacgatggcatggcccctgctaccattctcacgggtatgtctgggtataaagtaactaaacgtttctcggatgttttcaggaaggaagattcaatcatgtattggtctccttgtgccccatgttgagttgctaatttggttttgcgtgatggcaggactgcaggagagtctcggagcttgtcgacatacagccggtcctctgggaccaagtgccgattgtgaggaggttcagtggaggtggcacgtcatgtga

SEQ ID NO: 5975 - DNA, 407 bp, Zea mays
actgaacacatctcaacgcttacacttaccatgaaaataaggtcttggaagcaataatttgcatgttattagagccctgctattcaagctccttttcatctcaaattttgccactatctaaaactaaaaaaataaaaaaatcgcttaaagcattcagaatttcagatacacaaagtgagtcgcctcacctgatccttgacaagctcttctctacttgaaacatgtttctggttgcgagccgtagattccaactcgtttacaagctgttgcttccattcaaactgggatgtgattatgagtaccaccaacaggaagacaagcactacaggctttgacaccattatattgtatgagaggaaacctagaaacaaattcatcaatgaacgcactaatatgcagacattgca

SEQ ID NO: 5976 - DNA, 411 bp, Zea mays
  misc_feature (401)..(405): n is a, c, g, or t
gctgaaagtttaggattcagggcaattgttttgacagttgacacgcctgtgcttggcaggcgtgaagctgatatcagaaataagtacagcgcttgtatcgttaatgaaatctcctaaaattgagggaaattatgttcatttacaaaattcataattccagtttcctaacccgttgctactgaaggttaaaattttaagctactatcttataccatatcgtagatcgtcgatacatttatgtggagcattgcagtagcttcaacatcagaatgttgcaaaaaaaacaatccccttttcttttatcttgagatgttctgtaactgagctgattgttcatgcaggatgattgctccacctctgtcaaaccttgaaggtttaatgtcattagacgactttgacgnnnnnctgaag

SEQ ID NO: 5977 - DNA, 629 bp, Zea mays
tatagcagtctgtgctgatgaccctgaattccgtcactacacggacatcacggacctcccaccgcatcgccttcaagagatccgccgcttttttgaagattgtatgttcttaaactgtatccacagcttgtccccagtgttacaatccagatcataaaatgcagtaactagagtccaatcgttatgtttctgccgtgttgacagataaaaagaatgaaaacaaagaggtcgcagtgaatgagttcctgccagcgaaagatgccatcaacgcaatcaagtactcgatgtgagttttcttccacagactctggcatatatgttactactactactctatactagctttgctttgatgctattctatacaggacaataatttgtgttatcagaacagagctcactaaaccagtttggatgttgtactgcagggacctgtatggctcatacgtcatcgaaagcctgaggaagtgatctccagctgcttgattgtggttgtggatgctacaccattttctcaacagctcatccagagtaccgtagtacagacttaacacgaacgaactgtaatcgtgaccaagggatattattaccttctgttcatgttgaaacaatcagcagtgccctttctt

SEQ ID NO: 5978 - DNA, 648 bp, Zea mays
tgaatctgccgaatggaggatgcaatatgacaaagaagtagagaaaaacaggcagttgcatgatgagctttcaaaggtatttctcacttaccagatacttgtacatggctatgcccctcagacactccatccacggcgctcatttgagaattctcttcacaggttaaggcctcattagctggcacagcccggcgtcttgagttgttgcagaaggtatttttttttctgggcgatcaaatttaatacataccctctactatatcatgcactttctaccctgggccacctttaattttttgccagcccttcctcttcgctccttttcattttttaattccctctagtcctctacatgtgtataccccgcttaatcattctcattgctgcaggataacgagttgcagaagaggcagactgaatcgctgaggcagcaatgcaattgcactctccattgaaagttatgcaagattaaggacatggaaggagtttttcagcttctttggcggattagctatttttttccaacaccaagggaggaaaaccagattgagttctaggaatgagaactggcatatgaaaatgattgagaacatatatagtgtatagaccatagtgttcgtcctttataccaatggtgagctgcacagt

SEQ ID NO: 5979 - DNA, 931 bp, Zea mays
  misc_feature (718)..(718): n is a, c, g, or t
  misc_feature (787)..(788): n is a, c, g, or t
  misc_feature (798)..(798): n is a, c, g, or t
  misc_feature (864)..(864): n is a, c, g, or t
  misc_feature (884)..(885): n is a, c, g, or t
  misc_feature (889)..(889): n is a, c, g, or t
  misc_feature (905)..(905): n is a, c, g, or t
agaactggactgtaaaggtaacacaggaattaaagtcctccattcaccatgatttcttttctcatttacgttgttcaatcaggttgcagatttcggtctttcacgtctaaaactcgaaacgtttttacgaacaaaaactggaaaaggaacggtgagtaaaaaaaaaactacttgataaatataaatattctagacactcatctcccgaagagtgttgatgtcataaactttgatctaccgaatctgataattcgcttctctatgcagccacaatggatggccccagaggtgttatgtaatgaaccttcagatgagaagtacgtgcaacagaggcattgttgacattgagcgtcctgtcggttttaggattggcagatactgatccttttgttctttggtaaatataggtctgacgtgtacagctatggggttattctatgggaacttgtgacccagaagataccctgggataatctcaatacaatgcaggtaaattgtctcagtgcattggttaggcatgcacggacttatatcatactactatttggtgcacttgctcatatgtgcactgacttttattttatccttgtgcccctgctcatacaatcaattatgtgacaccgccatgctgcgctgcaggttattggagctgtcggctttatggatcagaggttggacattccaagcgatacagtcattgtagccctcctattgttcnccgtgatttaaaatcgtcaaatttggttggtggacaagaactggagtgtaaagggtagcactgaaattnnaaggtctccnactccaatcgccacgctttattttctcatttatgttgttcaatcaggttgcagattttggtaaacnagtgtgattagcagcccctnnatanacgcgccctttcattngagcagcgaccctcagaaacgcccct

SEQ ID NO: 5980 - DNA, 366 bp, Zea mays
  misc_feature (358)..(360): n is a, c, g, or t
tggagttaaggaagattcagctactgctacatgtgagagagaggtaaatgaaagcggacctactggaattccagaggacgaggaacctaaggaggagggagacacatacatggctagcgaattcagcggagatgcttcttccgaaattcctatggaaacgaaggaaaccactgacatggccgaagaagcagatgcagatagtcacaacgtaactcctgtgggaatcaacaaggaagacaccgacgctgcgagcaacgcaaccagaaattaccccgcgggaaccaagcaggaaggcactcgcgtggtcatggatgtaaacaagaattctccgccgaaagttcatcagaaatcaaggaannncatttc

SEQ ID NO: 5981 - DNA, 479 bp, Zea mays
ggcaagtccgcaagtgcttacactgacattaagtgaaaaacagccatgtctttcattgacatctgggaactggacctttttttcagggttttgttatagtctcagctctccttgtaactgcactgctacaattcgtgtatgatgggaagccaccatcactctactgcctgatggcattaccacttgttgcgacaagcatattcatctaccagaagtatccatatgttgataagaagaagaaagtctgatgcacataattgtcagagatgggaagtatcatcagcaggatgtaatgctaaccttattttgtccacaaggctggaatttgcaccgtcaagtgggccagatgtgactcttgaagagttgcctgttcgtgaatctattttcaattatctactgatctagatatataattaaattagcagtacactagcctggaatcagtttcagcaggcagttgacatgcttgcataataaac

SEQ ID NO: 5982 - DNA, 384 bp, Zea mays
gcatggagcgatgtcgtcgtctttgctgtgcgcgctatagcctttctcgtccgcctgaggcacgcatgactcgtccgtcgattattgtgctgcagtggacatgtgtatgtgctcctgtttctagcatatccccttgctttcaggaagaaagtgaaagtaattatatatatgatgatcgtgtaataattttcgtctacgagggagaacgaccttgtcatgcagaaaagatcaattcaagtggctcagcgttcggattagtggtttagatatatactctttaagactagtcattattagttcatatgccaccaactgtggttgggctgtcatttttcatcatatgtggagagtgagtcaatgtacctagctaggagcgttgttgtg

SEQ ID NO: 5983 - DNA, 397 bp, Zea mays
actggggcccggcgtgtcaacgtccaccgctatgtcggccacctcctcgacgaagtcgtcgtgcttcgccatcggatcgtactgtttcatgaccagcacagatgccaccgtcgagaattccggcagcgccaggtaagtacccaccggcccgagctccgggctgtccgtgctccagtcaaccagcggcatgcagggcgtgccctgtccgacgaggaacaggttgcaccgccctgttgccttgatcgcctcaacgacttcctctttccctcccactgtcctgtcttcatagcggacagagtcgttcccgttggccaccttggttcggaactcttcaaggaacgacgcgtcgtcgtcgctggcggcgccgccggactgtagcaagaagcgtaggacgtat

SEQ ID NO: 5984 - DNA, 579 bp, Zea mays
ctcccgtttgcaggtgtgacttgaaggtggtgagcgacgccaacaccttcttcatcgagaccgtcctggcgcaccacggcgtgctcggctgcttctccgagatcgtcaccaatccggcgagcgtcgacgcggacggcaggctcaggatctcgccgttccacgaccccgcgtccgcgccgcacggttgcagcctctgccctgacaacatgtgcaaggtactacgattataccgacagtactacgattacaaacagcatagttttctagtttaagatgtctggatgcccatactctactttcgacactgatgaaatctctgtgcaatgcacatagtcaacagtcatgtcgagatgcggaaactcaccggtaattcagcaataaaccaaagatgtgctcttaccacgtgcagtgcagggcaagatactggggaggatccaggcaacaggcagtgacaagaagcggcgccggcgcttcatctacatcggtgacgggaagggagattactgcccgtccctcaagctgggggaaggggaccacgtcatgccaagggagaactaccccctgtggcatctcatctgc

SEQ ID NO: 5985 - DNA, 402 bp, Zea mays
ataggagtgcgagggggagctcctagtcgaggcggaggaagaggaggagacgacggaagtggtgctcctaactttggtggagaaagtggaggactagatggtggagcaccctttcgagagggcggtagaataggagtccgagggggctgctgaacaggaggagatggaagaggtacccctaatcgtggtgcgggaattagaggagcggaaggtggaatgcccttatgaggaggaggaataacaggagatcgaataggtaccctaaactgtggtggaggaggtggagtgcccttccgacggggaggaggtactacaggagcacgagccgaaggaacaggaggggatgggaggggtgcccctaaccgtggtgccacaagtggaggagtagaaggtggaacaccc

SEQ ID NO: 5986 - DNA, 809 bp, Zea mays
atgacagaagtttgtttctcaactcattcttttcaatgatatacttactgcatcatcacattttcttataacgtgttgctgacgatatctttccttagatattctgaaagtcaatacgttggaaacacagactttctaatatttcgggctttaaatcagcatgggtttcttggacaactacaagagaggaaactggttagtgcctgattctctaatcttttagtaacttggatattcgggtgtggttcatctatagtcttctcatacacttaaattttttgaaaccatctcatatggttctaatcgttaaaagttccatcgattcagtgtggtgtgatacagttaccgtcgcaaactctactactttcaatgtatgacaaaacaagccgtatggttggcatgctcttccctaaggtaatcctaactgtagtcaaatgtacacatacctatatcatgcatttactgaaatgttgctcttttccatagaacatgctgatgttcaggccagaggccttaactcagccatcaccagtgcagcaggaagaacttatacaccaccaacaacaacaactacagcagcaacagagaaacatacatcgtcttcaacgacaactcatacagaagcagcagcagcaacatatgcagcaggtgaccttcttaattatagaccatttccatttgctaaaatattgccctttttgctcggaacatgatggtattcaaatcgctggtctcaacttcaaaatctgcatttgctgaaacagaagctactaccacaacgacttcaataccaagagcagctacattta

SEQ ID NO: 5987 - DNA, 857 bp, Zea mays
ggtgatttgttgtcccctctgagctttgtttgtgtgaatctaaacaatcggccatgcaattgactagagtaccatggctaccaacatgttatctgtattgaatatggaatatggttttgctcttttctgttgatagtttcacatgaatgactagatgaaccgatcatttgacatgaattcttggtgccttacatagttgtgctttgctttaggtgaacaggtcaaactagaagtaatatagatggtagatgtgtaaattccttgttccatcctctgctactttgatgcagatgggtctcgatgccgtggtggccgcctgctacgtctttctagtacttgtctctgtgctcacagttcgcttcttctacgtactgtggcaaagtggccaaccagagtcaaggttgtgcaccaccagattgcgttgtctcaatgtccttggctccggtgagtacgtattgcagtcttgcctgtcaaataccttatggacaagttttagatatggttgcctggtatataaaacggtactcatacgtgtaagctcatacggtactcatacggcaaataaaaacattctcaatctgggtagtaaaattgtctataaataaaaacattctaaatctactaaagaaaaggtccagattaccagctccgggtgatgctgatgagctatctgtcattgaagaccaaattgcatggattgttcacataattacatccattgtcaagtaaggcaggtaacaggtgttaggtgagcaatatattttttcttttatttgtaaattttgttcttttaaatgttgtccttgcttgctctacatatatgcgattcaggaagagcccgcagagaggtcgaggag

SEQ ID NO: 5988 - DNA, 404 bp, Zea mays
cctctttgtcgggcaagagctcttggcctctgtggattatcagcctgattcacaactctctgcaagaattcgagcgcagatgggccaagaaagcgcggctgacgcgattcctggtttgatggtttctgttggtgtttcgggctaacagactctctttttttttgtttacttcctcaaagttccacttcaacatgtggtttctatggatccgggcttcccgagttggaatctgatcactcgcgtcagtgcttcttagcttccttcatttgccgtcatggaggagcagaactcatggcttattaggaccaagttctcccatactgtctacactagagtggatccacgaagagtagcagctgttgctccggtgggcaaagatgtggtgctgccttttgctccgctta

SEQ ID NO: 5989 - DNA, 791 bp, Zea mays
  misc_feature (740)..(740): n is a, c, g, or t
ctcatgctttctttacacacatttgagaaagaaagaaaataaaagaggtcatctgatactatatatggtatttgtccaaggtccttgagaacttagacattccagaagagctgagagaaatgttcatttctattccggaggaaaagtttcgcatagatatttcatctactgaaataagaaagagccaagggctctgatgtatcaagtggtcgtattctacagcagatttgggatgattctccacgactatagaaggtacaaatgaatcttttcaaatagctcgtgcgatgcttaactccccgaggaatccacatgtatattagtaaaacacatagcactagcattttacatatgagaagacattgaatgatgtatactatgttaatcctctatttttttccatagacaatcaggcaatgttagctagttttcttgatgagcccatattggatactttttatatgtgttgtacacttgtacttaaatccgtggtatcacaattgaaagagaaatcagtaaatcaccattcaattcttgataacatatgctttgttgagattacaacattagtgtccatttcatattgattgttgaaatcctgaaaatatgcttgtaacacattgctaggtacatttggatgctagcagtcaagtctgaattctccaagcttactttttcacatttgtggggttgtattcacgcattctattgcagattatgataggtccattcatgcatcnttgcaaaggaactgttgatgtattctcagggagaatattttatttaacttt

SEQ ID NO: 5990 - DNA, 515 bp, Zea mays
ccagtggtggtactccgctttccacaatgtcacggccatggtcggcgccggcgtgctcagcctcccctacgccatgtcccagctcggctggtccgtccgtcgtccgactcgtgctctactaatcacaccatcgatcgatcgatccatcagccatcatccatcatccatctgtcgatccggttctcaatctcgacggatcgccttgcagggaggtcggcgtcacggtgctggttctgttgtgggccatcacgctctacacgctgtggcagatggtggagatgcacgagtgcgtcccggggaagcggttcgaccggtaccacgagctcgggcagcacgcgttcggcgagcgcctgggcctctggatcgtcgtgccgcagcagctggtggtggaggtgggcgtcaacatcgtctacatggtcaccggcggcacgtcgctgaagaagttccacgacacggtctgcggcgacagctgcacggacatcaagctcacctacttcatcatgatcttcgcctca

SEQ ID NO: 5991 - DNA, 388 bp, Zea mays
ttgtttgtcattgttgatatgaatatctggtatgcatggactgactatgttttcagtgattgcctgtcaccgttggtctgaatatctggtgaacatagatatgctcagtgacggtgcttgtcattgttgttggtctggatatttgggttcgcaaggatatatttgcagtgctgagatgcaagtgcttaaccgaactgtagccaaagtaaccctatgctagaagtagctggcaaccatgttgaattgttaatctcgttagtttttttttctggggtcttgaaaatgccctccagatctctcacgcgaacgtgaacttcacctatcttctctatcgagctgcatcgccctctcttttggcgagcaggtctttggattcaccgtttgcttg

SEQ ID NO: 5992 - DNA, 406 bp, Zea mays
ccttattgcagtgtttgacctgggtggtggcacatttgatgtgtcaatccttgagatatcaaatggggttttcgaggtaattttcttctcatatcttgcacagattctctatgcagatgttgaaattggtgtagtaattcttaattctgacaccttgttcaggtcaaggcaaccaatggtgatactttccttggtggtgaggattttgatggtgcactgcttgaatatctggttagcgagttcaagaagtcagacaacattgatctgagcaaggacaagttagcactgcaaaggctcagggaagctgctgagaaggccaaggttgagctttcgtccactatgcagactgaaatcaacctcccatttatcactgctgatgcatctggtgcaaagcacttcaacatta

SEQ ID NO: 5993 - DNA, 693 bp, Zea mays
gcaagttgcttgggtggtaactaattttcttcgaggagctgattgggtggtaatgtcttgatgagaagtttcagggattccatgatactggcaaaagagggtcgtctccagggctccctgagtaagcaattaaaatggtccatcaaaacaagttcgatggttgagtaatgagaaaatgcataatagcacgtatgttagtattacacctgacccagcaggactcgattactgccgccactttcggatcaacgctgcttgggatctcaagcctttgtcccttgaaaccaaccgctgcaacgacctgcaagtaaaattgtacgtattttttaacaaaaaagagagaacttaaggattttctccatggggtatatctaaagctagaaaacgtcaatgtgatactgtgatgcataaagcatgagatgcaaacctgagctggatttaaattactccatggctgctgcaatgtcataagctcccataagattacaccgaagctgtaaacatcagacttctcatttgagggctcgtctcgtagaacttctggtgccatccactcaggctagatagcatggcacagaataacacttagccacatagaattgcgtaacaaaacaaaatacactaaacggaacaatataacttacagtccctgctgcagtcttggaagacagaaatgtgtttgccttcaatctg

SEQ ID NO: 5994 - DNA, 679 bp, Zea mays
ccggttaatgctgcaacaggagtccaaaggcgccagagtatacaggaacggattccattgtgcttcccaggtgttgatcttaatatttcatttttgatgtttgtgctattaggaattattcctggtaagaagttaagaacgttgctagaattactttctataagtgcctgaaagcactgcgaaattgttaagctacaacattagtagtgaactattgtcacaagatgagaacaggaatgttacaaccgaggagattggaaatacaataccttgagcgccaacaacatgaaggtattcttctgatatttgtttccattctcttggtttgcaggttgtggtgacagagggtgtgaagtcactttataaagggtgagaactgcatgtactgcatctatatgttttatattataataacagtggtcgtttactaatcagcttgatttgttcaacatgctgtctctattttcagtggatttgccacattcgcgagagtaggccctcagacaacgattacctttgtcgtgtgcgagaaactgcgcgaacttgcaggaatgactgctatctagtgccaccccaaattgcataatgtgtggggtccaacggttgaacagcatactctacccgagttttcacaccattctttattcaccattcatgatgagaagggagaagataagca

SEQ ID NO: 5995 - DNA, 826 bp, Zea mays
ggacttgaggcagtgaactttataacagttgcgtcaccgcatcttggttccagaggaaataagcaggtacctagtaacatcatcgcattcagaaatgaaaaacaatctatcatttcttgtatggaagtacatgcaaattggtgtaaaaaataactaactttgttgagtgataataatagtataatagcttcgtctacagaatccttttagtactcataacatgtttcttcaaacgcttgattgaaattttatcttgtttcaattatacaggttcctttcctttttggagttactgcaattgaaaattttgcatgctacatcattcatttgatatttggaagaactggcaaacacctctttcttactgacaatgatgatggaaagcctccattgctacaacggatggtggacaattggggtgacctgcaattcatgtatgcttatcttcgacaactggtttcatgtgcctgggttgtgaatgcttatagcttattaatgtattgttgtaggtctgctttgcaagcatttaggcggcgtgttgcatactccaatgttggtcatgatcgtatccttacatcactcctgaaattagcatgcagtaataagccttgtttaaagttttttccataactgaatgttgattaagatattgttgggtggagaacatcatctatcagaaaagattctgaactacccaaggtaaaccttgtgtacttttcgttgtaacatgtgttggtttggctgacctgtatatggccttttctttcattataccatttctaatctgcatttatgtattttccagtgggttgattcaaccaacaag

SEQ ID NO: 5996 - DNA, 353 bp, Zea mays
agtaagataaataatataaacaacaacacatccgcaaatccgcaaaaatgaaatgcattctcagaattggtaactgacttttagaaactagtataattgaccaaaagctagtacttacaatgcatatatgattacgatagtcaaaccatctctgtatttgaacacagctggtaattgaagaggaactgacgagtcagaaacagaatagggttatactttacataatcaggtttctgagatactcacagagatctgtatttctcattttctgcaaggcgattgagcacatctatctcaatcattgcagcatcacggtacttgcggatactgcgaacaacttttatggcaacata

SEQ ID NO: 5997 - DNA, 369 bp, Zea mays
tattgaccttctcacaggtcaagcccggtactcaacctggtcagaaggtagttctgagaggaaaaggtaatctactgtgcacgcttttgttcttttttggcggtgcattatctctttaattacggattgtaacacggctatgatgcgtctgtgaaatgattagtccaaaaggtttctggaacatagccatgtcagagattgttttcttgtgtggaagtaacaaaattatgaatcgatcgaacaatcaaattctactgcatgtgtcaagactggaaaatttatctggcgtctaggtgaactgccaatttgaactgaagaagctggtggaaacttgcatgctttatctaaaccctgatgcatctatcctgc

SEQ ID NO: 5998 - DNA, 241 bp, Zea mays
gtctcaaactggaccgatgactgcgatacagcgatgagcgccgtgttcagccagtaccaggagatcgacatctacaacatctacgcgcccagatgcaacctccctccgtcgtcagctgcacttgcacttgctgttgacaaggcagtcgtagccaacagacaggtgagccgtgagcggctgtcagtgtcagctcgatgtgcacgctctgttctggtttctcaactcctgacgtttttttttt

SEQ ID NO: 5999 - DNA, 395 bp, Zea mays
ttttggtcatggcagctggccagctagttcatcgcagtcccgtagtggctgagcacagttttccttggtaacaagttttcaattggatagcactgaagaactagggctagtgtaagaatggaacccagattataatttcttggggcttttgatgtaaatgaaggcctagcattccccccttcctttgtctcatttaagaattattaagagatgactgtgagcaaacatcttggagcgagctttgcaaccaaattaggccaaacacaagtgcaagccttcaagaaaggaatagcaatgagtgttttggggaaataaatctttttcaatattttaggtagagagattgagagaacaattgttgtatttgcaaacccactgttcgtgtacatactgga

SEQ ID NO: 6000 - DNA, 688 bp, Zea mays
catggagacaattggaagctgttgttgctgccaaggctgctggagatgacatggttttggtcaactaggtaatataacctttcgcttcatttatttgttagtgcttgtgttcgtaagtttttctagtcttgtatcctaaaaccgtactactctgtttatgtcctcttgttcttgctttgttttagcatatctgtgagatgcattgccactttttgtactgctcaccttctgttttgacttggtcatggcagttcacaaaaagatggaatatatctgtaccaaagtttcaatttattatggacatttagttcttagtaatgtcaatcagaccaagcatccataagtatgcaaacatcgtttgaaaggatgtttatgctttctcagatgatagctgctcacttatttcatgagcgtcatgtgcgcttatcgaggcaacaaggtatcggtgctagttgcggtgctcttatatcaacattgttgacttgggactatcagatccatgttccttgcatcagtgcaaaaaaatgcggaccgagtttgaacacattggcggcagcgaaagccaattcatgcagaatttctttgcctagtgagatcctgctgtggttctgagcccttgctttattcagcccctccttttctgttgcgttaatttatgaataattggactcttgtgttaatccttcag

SEQ ID NO: 6001 - DNA, 887 bp, Zea mays
ggaggtctcgcagcactccaaatacttctgtgagttctgtggcaaggtaaactcatcgattttgtgatgccttgctttgataatcacatggcaaactggtcaatcatttacggtgcattagttgagtaacagtttttttttgctatttttaagatgcactattgcttattttttaaacaattatgtgctattgactaattcctgtgtctccttttttgtggtaacaacaatgaatagtgacctggtgaaatatgttctccgacatttgcaatagcaatctgtgatcgtctttctgtctttcatatagctgtattgatgttataacttctctgagatagtttatgccttatctgaattctactagatagtcggttaatgtcaaggcatacgcataccttgccagaccttttctgggttttcactgttttaatgaaactcctttatgaattatgtgccatgtttctttctatttgcttttttgattcttacttgtgccattgccttttgtatggccaatacttgacaacagtttgccgtgaagaggaaagcagttggtatctggggatgcaaggactgtgggaaggttaaggccggtggcgcctacacaatgaagtatgtgatgatgtccggttactctgtttatattgaatcctcgtgtgttttctaattttgttactttgcatttccagcactgctagtgcggtcactgtgagaagcacaatccggcgcctgcgggagcagaccgaagcatgattgcgggcagcttgaaaaggagtacctggatttttgtagttcagccaagagccgtgaaccattttgcctttttagctaaatgaacaagaaatgtttatctatctgtagtgaccactttgtactcatggttgtca

SEQ ID NO: 6002 - DNA, 374 bp, Zea mays
tcataatccgcgctgtgtcctatgcgcctcatgcccagaatctggactacatctttttgctgaatgttgcttcaccagacatatttgggctgatttgagtatttgggctgcaattacggagatccaccattcttcttggcaacctgtagattcggtgcaccaatggtggtcgaatcttgcaacatccgcagtgagaagcgtgaagggattgcgaaccctcatcatcctcgtgtcttggacaatttggtgtgagagaaactcgcgaatctttgagcacaaagagaagaccgtgacacagactatagcgatgattaaggagcaaatccgcctgtggattctaggaggagcaaaacacttagcaaggctggtgtagg

SEQ ID NO: 6003 - DNA, 365 bp, Zea mays
tatcaacgatattataaggataaatgtccgagttttctttatctgacatgttaaatgaatgtatctcagaggtagagaacacttctattgttctacaagtaggcagctatataacaattgacagcaaatcatgaagaaattaacagtgccatccaacagaacttctctaacacaatcagaggactggagttagtcaacaacctacacaacgtaggaatataagcttttctttatcagaatggaaggaaatgttcaagggaagaaaagcaaacccaaatggaaccacgaatttctaggaatgaatttcacccatggagtaattatttgagttataatttgcaggtgttcaaatgcatgataatgga

SEQ ID NO: 6004 - DNA, 395 bp, Zea mays
  misc_feature (385)..(390): n is a, c, g, or t
ccatgcagcagcaaagagcgagtgtaaatggaagcgagcctctcgacacaactgaagcctcagctcctgcaaggaacgctgaatctggatcggtcggcaggggcgtggggcgaagcagctgtaagctttttggtttctccctgactgagaagatccttggaacagatggtggtggtgtgaaagaagggaactacgaagtggaccgtcaaactccccgggtgctagacttgtttgggcacggttctacgcctggtgctctgcatgctctctgtgctgctcccttgggaatatgatgctgttctgcctagttttacagcagttagaattatgtaatctttcagccattttcatcgcgttgtacttgaccaatatgtccagcgtatgnnnnnncagtt

SEQ ID NO: 6005 - DNA, 370 bp, Zea mays
  misc_feature (359)..(362): n is a, c, g, or t
gacgcggagaaaggtggcaaccatgacatggatgatgaggagtacctggctcagttcatgtgcctgatgtacgacaaattgttccgtgagggtgtgactgtggatacagctctgcagcaagctctccgctcgcatcccaagttaaagtacagctgccacttacctcacgttttgtagttagggacattgacaaaccatacaggagtatagcaaaacggacatggacaacaggaaatgaataaggattgggtggattcatagtggggttatagaggtttatatcgtgttcgttgtgcaggcgtagtgacagagggtacccccttactgaatctttgggcgagaaagcctatgtaaacctnnnntgctcatg

SEQ ID NO: 6006 - DNA, 421 bp, Zea mays
cattgcgaccttgggtggtgaagaccatccacagagagatggttgaccagcaggtgcagcccagcagggcgacctattgttgtctcctgcacgcatacaccagggcacgctatggcgaggatgccatggccgtgtaccgactgatgaaggatgaggcaatgggcatcgatgtgatgctgtacaacatgcttctgtccatgtgtgcagacattggctatgttgacgaggctgaggagatcttcagagacatgaaggcgtccatgggtgcccattccaagcctgatagctggagctactcatcaatggtgacgctgtactcatccactgccaacgtcctgagtgcagagggcatactgaatgaaatggtggaggccggcttcaagccaaacatctttgtcctgacctcactcatccaacatgg

SEQ ID NO: 6007 - DNA, 388 bp, Zea mays
tttctgaaaagaaatggattgaagaaacttcttccagaattttccctttccgtcttaccctccctcgcaagagaagatgtgtcccatcaagttccagcaaatccaacggcctcagttacattttttcaagtgggaagccacaaaagggcagatacgttgacaataacagtaggaaaagcaggtccctcactagagaggagatactatcagattgtcacaagctggtgaaggagcttctttctgagcatgaatatggattcaacatcggaattttcaaacgccgtttttcccaggagtatgggtacgagcttgaacaccggaagctagggtatctggaccttgaaacgctgctgcatattatgcctgatgtaagggtgaaattcccaag

SEQ ID NO: 6008 - DNA, 500 bp, Zea mays
tcagtgagcctttaacttccatgtctacggcttgtggggcttctacctttgaagtttggatgtcccttcctaagtgggcagcacaggttcgtttctgacattgtttgcatataatatgcactgactagaattatgctgttttgatgtgatcttgtaaatttttttttcacttatgcaactctaaccttacaaattgaaccagtaatgttcaacctaacattctttgaatgtttaggttctgaagcatctagcgccagatatatcatacaggagtttggttgcacttggtattggttgtataaatggtactcctgttgcttcatttgagaggcgagatgcagaccgtcttcttttcttttgcacaagccagtgcaaagatttggctaatgaaaacggtccatattttcatctgccaagatggtcagcctcccttaccaaggacagaacaaagttgggttcagaatcaaaacaaaatctgttgggtgcaaatggagttttgg

SEQ ID NO: 6009 - DNA, 384 bp, Zea mays
tgggtagtgtcgagttcgcttccatggttgctgcattgcttgggctgtcacagggcatcgcgctgctcttgtccaaagggctactcttgcttggtgattatactgcgtactacaaccaatacgccgttgggttctctggtgttctgtttgccatgaaggttgtgctgaacgcctggtcagaagattttgtctatctgcatgggatggtcattccggcgaaatacgctgcctgggctgagttgatcctcatccaggtcttcattcctggcacatcttttcttggccatctcagtggaatacttgctggattggtttacctttggctgaagcgggcgttgaatgggccagatcccctcactcttctggtgtcaagcattaccaaaa

SEQ ID NO: 6010 - DNA, 747 bp, Zea mays
  misc_feature (660)..(662): n is a, c, g, or t
  misc_feature (668)..(669): n is a, c, g, or t
  misc_feature (700)..(704): n is a, c, g, or t
  misc_feature (714)..(716): n is a, c, g, or t
  misc_feature (718)..(718): n is a, c, g, or t
  misc_feature (726)..(726): n is a, c, g, or t
  misc_feature (728)..(732): n is a, c, g, or t
  misc_feature (736)..(737): n is a, c, g, or t
gagagtcgttctctgtaagtgcaaattgtcgctgcattcttctttacttatctcctcacaagttcagtacacaagacagaagaagcgctaacgttcacgctgcattcggatatgtcaggtgaaatgcagagtgagaggagacaccggaccagcttgcaacgctgttagaatggtcgaccatacgatcctagggatcgaccacctctacagacgatcagtttatgcgtgcacgaaggtttgatatgggatgcgatgcgacacggacatctcagttttctgctcccctgtcacaaagctcaaataagaaactacagcagggatgcaatatagattatccagagaatgggtctcttccacctgacgctccatcgtggtgccaggcgccatttgatcctgaaggcctcctcaggtcagtgattcactagctccttttggtcgctgcccataagcctttcttgcaatgcaagttcatatccaatcgagtgttagttcttactgtcacttgctcgtgtttcagctccgttatggcgattgtcacttgcttgaccgggctccagtttgggcatgtaattatacatttcgaggtataatgaatgatggtctgtgatactaaggttgataaattgttcctttttagctgtgtaaaacattcttacattnnnctcccnncgctaaattttacctgcagagcatcgaggannnnncaccagttgnnngngcccttcntnnnnnatgnnctacactctg

SEQ ID NO: 6011 - DNA, 508 bp, Zea mays
taagtgtagaacaatttttttgccgttaacatagtgtataacatttgatgtcgtaatttgttttggaagaaaatttaatttcaacatagaatttttttaccgataggtttatggtcttttaatatctacaggttgtggaaactgagatcattgtaactcaaatgagagcttggcacttagcatatagatgccactagaaccaatttggaattactgtgaggtaattttatatcttgttttgtaagttggagaattaatagctagcatatgcttccttaatgatgttttctttttccatgcatcttcatattaccaaacccttttcttgtaggaaaaacggatatagagtgataaaaggcattaatgtaagtactacataaatgtactacttgtatttttcaataatcaatgcttcaaaagtctatatatatgctgactggtgtcagggttttcccattattgtaagtttgttacaagcaagtgctttccctcacacaacttcaccttt

SEQ ID NO: 6012 - DNA, 994 bp, Zea mays
attatgtcgataaaggaaatctagaggatcatcggcaagagggatctgtagaagattcactggcagatagttatgaaggtaataatgacagatagatatgccataattttgcatgtgtgggatttgccctttttttctataacaccggataaaggtgtacgagtgcatgtaagagttgcataaaggcttgagaagctggcaactgaaatgctgctgaatgctacctgttaatttgtaagcttagctaattacaaaattactgatcggagtaagatgtgcactgcacatctaactgcagtcggtttcctgctatagctgtgcattaagacatctgttattacagaggtgatgatccgtggccttacacaagtggcctgggaacgggtggacgtatgctttcataagagttggctaagatacaacgcccataataacatccaggtaagactaacagcctagccatctgcggacagttattttagtacagtcgcactttgcattcatacttttaaccatctggtgattcatgctacaacgaaaccaccaatcaggagttcagttcaactgctaagtaatataacaacttaaatgctgtaaaaaaaaatgacaatctttctgttgggcagctgagaaagaattgtatacattgttattgctactactacctgatcagtagctgtgaacttttcccttgacgtatatgacacttccttgttagttagtaacagatggaacttccctgtatcgctacataatttaccttattgcagaaaggatatagggttgtagtttcagggaagtctaagcacttcttttggttttactatggttgcaggttaggatccatccaattaattcagatggagaagacgtcatataccatatgatagacaattttgtagtgtagccaagtactccggtgaatgccaactacgtaaaagattactgctatttccagtggattcgccttgggaggtcattaatcttttaccat

SEQ ID NO: 6013 - DNA, 1431 bp, Zea mays
  misc_feature (1381)..(1385): n is a, c, g, or t
ttgctgcatcaccgcttccttacatgtaaaactggaggaagtcgaatctttttttgctcagtgtggcaaggtacgctacatgtcttttagcactgattgttgcacctaaaagtaaggggtaaaaaactacaaccatcacaggtgtcagcagaacttatgcaaataggaaactgatatataagatagataaagtttcctattgctattagacattcaatattgttatgattgataatagcgataggttccctcatcaaccaggggttgtttctgtggcagcaggctttgaccatgctggtcttttgagaactttgatttgttcttggttgatccctaaacaaagactcggctgcgtttataagagaggtcatctagctaacttagggaactaggaaactgacctctagattttcctaatacgaactgactagataacttacctaacctaacttatgtctttccataaaagtattgtagagaacaattctttgagctggaaatgtactgtatgaactcacatccttgagtttatgcatccgaggttaatatgataaattggtgtcttaggccattaccattcgaatactagatgttcattgatcttgcaatgtgaatagtaaatactgctaatagtatttgtatttgtactatttgcattacaggtaaatagtgtgaggctacctcgacatgtttctgacaaaaggcatttctgtggcactgctttagttgaattttcagaagaagatgaggcaaaaggcgtttttgagaaaaatctcatttttgctggggcagacctggaaataagaccaaagtaaaccaactactagttcaatttatttttatgaggtgccatctattaattagaaatgttgcgttcatgcttttgagtttcgacaacaaagttctttttatcttgaaaacgccctccctccgctgcatttactaaatgattggggagtttgatcaggttctcattcacaggccactacgcactccccaaaaatattcttctagttgttgtattgattggttttggtgagaatcttgcctttatggttgcagttcatgtgacaaatgttaagctgtttgttcttgttgaatgattccaaaatcagctcctattattttcagaatttggacttcattgagttttttttatacttttgagtttatcttatgacaatgtatatcatgtatcctattatgaaataatgtaggaaagaatttgatactgaaagagaggcaaagaaagaagcatatgagaagtcacatcctaataagagcagtcatggtgaagggtaaataccctttatctaatttgtttcttatttataatttatttgagtttcaattaacatcgtgatacattgatattggctannnnntatccaaaaggtctgattctggccttcaagctgaagaaaactgcag

SEQ ID NO: 6014 - DNA, 412 bp, Zea mays
agttctcttcgcagatgaagccgccagaaagatagcatgagtgatcatttgttcatccttcctgcctgatccgggaaaccaaaaaataaggggtccatgtccatgatccatccacagaatgtacattatgccataacttgtagcagtagtaccatctaccaatggatgatagcacgagcagttaactcatctaggcagccatgtcttggttttcatcacaatggtccctcagtgcctttgcatcctctttttctctttcaccaccaattcaccatatggatgtcagttgtcacagctgtgtgattggctggaggtatcagctgaactgaagtagtagtgacttgtgaatcttttgatacagggcatgggcaacgcctgacagagtgaccggcacaagttcacagctgatata

SEQ ID NO: 6015 - DNA, 470 bp, Zea mays
aagttcatactcagcatctcgttgttcctggggctgtccatcccacagtacttccgggtctacgagatgttcttcggcttcggaccagttcacacccattcagtagcggtacgcgagctagatgcagtagacgaaataaattccattaagctctcacatcctcacctctcttcctcctacttgccgttgcagttcaacgtgatggtcaatgtcatcttctcatcgccggcgacggtggccgccatactggcctaccttctggactgcacccacctgtactgggaggctagtgtgaagaaggacaggggctggttctggtgggagaagttcaagtcctacaagtatgatggcaggagcgaggagttctaccgtcttccttatggcttgagcaggtacttcccctcgctctaggacgccgggaggaagacgacggacccaagttctatgtagctgctcgagcgtagaagctg

SEQ ID NO: 6016 - DNA, 393 bp, Zea mays
gcacataagatctactgatttgcatatatatacacagatcacagacacagcaccaccacttacgcacgcctaatcacctcaccaatgcaatcccctagcttctttcttagtagcatccaaaatccgtcctcccctttcaatttgtacgcacgcaggtaggtacgtacgtacacttaagtctcgcaaaattaaattaacgcatcgatcgatccatcgagagtggtcgccatcgtctcgatcgatccatcgtcgtcttgtagtacaaaaggaagaccacgcgcgcgcctgcatgccggcccgaccgcccctccgccgttggtgatcacgtactggtcatggcatgaagagcttgttgccgcacttgcagcgccacacctccgggtagtactccca

SEQ ID NO: 6017 - DNA, 440 bp, Zea mays
gcagcaagtagttgcacgtacgcacgacaaccacaatggccgcaacaagctggtacagggcaaaagtaaataaagcaggataagacacgacacaaaagaagcgttaagcactcacatccatatcggccatgtatgaataacaactttagtcgccacaaaatcttgaccgaatatgatagcccttgaggcatgtgcttctgctccactccatacagcaacggtggttgtcaagctcaaacagagaaatcacatgtcgtcttgggatttttctagagctgccaatcgatggcagacagccccagcttctctaagatctcgtttgttttggagaagtgcctgggaatcatgaaatcagagtagcacatgacagatgtatcaaggacaatcacatcaatagctactcctagcacctctcatttgtttggattcggcccacataa

SEQ ID NO: 6018 - DNA, 380 bp, Zea mays
gtcgcactaacactgattttcgctatccaacgatgtgacccagctccattttatctgttcgacgagatcgatgctgctctggatccacaataccgaacagcagttggaagtatccttattgtttgttctagtgtctagctatgcacatgatcaatgcctcttctttgtgtgtcaatagtcctgctgctttccttaagtttcattccagatatgatccgccgtctagctgacatggctgacactcagttcattgcgaccacattccggccagagattgctaaagtggctgataagatatatgccgtgagacacaagaatagggtgagcaacatcgacgtggtgtccaaggaggaggccctggacttcatcgagcgtgatca

SEQ ID NO: 6019 - DNA, 701 bp, Zea mays
tatctgcagtccgagatctacagccacatgacaaaccctgctgactctgttttcctctgacacgaccatgagaccagaagctatccccagcttgggtaaagtggcatgcgagaagaatagggctgctgttgctgccggctgtttgcactaataaagccttgcaggaggctctgggcagcttttgcttggtccagtgtgccctggatctccaccacagactcagaagaaccagcatgagcctcatgtagcctcagtcttgcaccagaaacctgggggtcaagtagaacattaatgagaaaatctattactacctccatttttttatttgacgctggatagttcaactttacactaacaaacgtcaaataaaaaaacagagggagtacgtcataagaggacgcattccatttagcagtgctcgtggaagagaaaatctaatcataacagaggatgcagttcatataccagcgcccatggaataaaaggcataatgagttctatacctgacggatctctgctagattgaccccaccagcaccgacgatagaccccaaagaactatttggaatccttagttcaatagtgctcaagaaccttctgccaaaggaaggtattttcaatgaaatctgtacacgtaaaattaaaattatgtttaagaaggaaggcctccggtcatacccggtagcacttgtcggttctct

SEQ ID NO: 6020 - DNA, 395 bp, Zea mays
atgtctgggcgcggcaagggcggcaaggggctgggcaagggtggtgcgaaacgccaccgtaaggttctccgcgacaacatccagggtatcacgaagccggcaatccggaggctggcgaggaggggcggcgtgaagcgtatctccgggcttatctacgaggagacccgcggcgtgctcaagatcttcctcgagaatgtcatccgcgacgcggtcacctacaccgagcacgctcgccgcaagaccgtcaccgccatggatgttgtgtacgccctcaagcgccagggccgcactctgtacgggttcggtggttgagcgcatctcttccctcgtctgcagcggctgccggtggcgtttcctcagttccctctgccttgcttggcttgatgtagagagta

SEQ ID NO: 6021 - DNA, 637 bp, Zea mays
tcctttgtttcttcaaaagatgaggtaattcagtctcttacgtttctcagtgccttacttaagttttgtctggaatgatatgcaagagtatttattgatacgcatcagttatccgtgtttaggctgcacaagggctaagagagagtgtgcaaaagctcaaagttttgcatggttccggtatcactgctctggatgaattagcaggtgaaatcgacatgaactcgcggacaacatttgagagattaaattcacagatacagtcacacacatcagcccttgagaacgtaagttcgtttccgttggcctgatgtgaacgcagtgggtttttgcagcatttctgactgtttacttctgttctaagtgtttcggaggaatcgcttcggaagcagataacttgttagatgagcttcagcgcagcctatcgaaacaagaagagaggctagcccatttcgcagtgaagcagagggaggtctgcatcttgtcgaagcatggagtcattttgctattctcctacgctgcttcggtgctgtaacttttgttgttgctgggggtgcagggacacctgagagctgtggaagcgtcacgttccatctcaaagatcactgctgggttcttccactcgctagatgtccataaa

SEQ ID NO: 6022 - DNA, 131 bp, Zea mays
  misc_feature (14)..(14): n is a, c, g, or t
aatcatgattgtcntttgtccaatggtttcaggcagttcctttatcgtatttcctctgctgtattttccatgcaatatcttgactgatgtatgctcatgctcaacacctccaataaagcgagacatgctat

SEQ ID NO: 6023 - DNA, 559 bp, Zea mays
tatacaccacgtgtgatctcacaccgtggggtcatcccttgcccttcaagtcaccacggataatgcggagcgcgattcagttcatttccaaccggtggccatactggaacaggacagagggagcagaccacttctttgtcgtgccacatgactttggcgcatgcttccactaccaggtgagttgtagagccataacaaaccatgaaccatcagatgtactgccagtgcagtgtggaatgaacctagcctggaaactcatataacggagtttgaaatctttctatcattctattcatgtttgctcatataggaccattcgtctaatgtcgctcagcacacccattgttcaggaagagaaggccatcgagcggggcgtccttccgttgcttcgccgtgctacactggtccagacttttgggcagaaggatcatgtctgcctgaaggaaggctccatcaccatcccgccatatgctcctcctcagaagatgaaaacccacctcgttcccccagggacccctaggtcgatcttcgtgtatttccgcggtttattctatgacac

SEQ ID NO: 6024 - DNA, 375 bp, Zea mays
aagagttccaagtgcatcacttttttttagttgccctcatgttatgagattctaatctctatccattcaggttggcatgtactttttgacttgcgtgccatatttttggctttctctatgatgtccaaacttgcattggtgtaccatcagcttcattcaagaagtactaatagttgatacctgaggctctgagttgtacgtgaaatgtctgttcttggagttaggatatgctcggatggcaaatgaatggccttgcctttacactcttgtccttgatgcattactggaccgctggtagcatacatgacagacgtccgtcttattgtgcgcagataagacatgggtcagattttgggttagttcaggttgatcagt

SEQ ID NO: 6025 - DNA, 686 bp, Zea mays
tattggggacaagtttgggatggttctcaggtttctgctccgtacatcttcacccttgctgtgaatttaactttcaactttgttgcctgccacttctcgcccagtcacagttactttacacatgcaaatattttatcggtacctatctcactaaataaccgaacaattacttatacttcttttctttttgttttgggacattgatcttcgattgcgttattattaggttggtaggatatgttgtcattggaagtcaacaaaaaaattatatgaactggctacaggtttgcatatctccatcttgtaaataaaaaagaaaaatgcctgcctcaccctgtcatggtggcaactattggacgcgtcttctttaaaattatgattgaggtctcatgttcctgcagagtaatattcttttgaataattgtgagaagtattggtatggtgcttatagacaaataaagtccatctcgtaagtatgctttgttctgtgtctacatttattcttttttacatgtgtagttgtgtccatattttgcagattgagtagctgagaatattgtgacaacgtgtcattccatgcatcaccctgtttccatcttttgtattatataaaactaagttgaaatcaatgcaaccaactgattgactttaccaatcttcattgatccagatcgctgtcaagaggt

SEQ ID NO: 6026 - DNA, 1307 bp, Zea mays
tgtgattttgtattttgtttttgctgaagtttttaaaatttactcataatgtgttcatgtattgactgcagcaccatttttttgttgtcctgcgacaaatgctcgaagggaggccagaagtatcagaattgcattcaattgaaggagctaaggttccattgatgcgttttaaattcaatgggattttagttgactttccttatgttcaactcccagtgatcaatgctgcagaggtaagcatccggtcttgaattagtgtttgtttactacatatataataaacatgttatatttgttgattcatggaatttgtatttctactctcagaatatctttttttgtctgcacaccctgtaacactgtttcatcttggtcatgctgtaccttgataagctattgctttctagttcctacaacttttggtagcattcagtgagtgcctaattcttaagaccgagaaatttcagttcaccaccttaataaaattgtacattagtacatttatttcagcatgtttgggtctttcaagtgattgagcaaagcatggtaacatctgtgagaaactgtcttttatgtccttatgcatatactacatgataactttgccctcccttgtccatcatgtgttttttaccattagtttgaatttgtttaactcttgtttagcttgtataatagagatgctgtacatgatatcttctgcttattttaagttctcttgggctgtacactgtgcaggctatgcatgcatttgatccccatgttctagagaatgtggatgggccaagttggagatgtctatctggagtccgtgctaatagacaaatcattcaattagttcccaatatgaaggtccaacaaccacctcactagatttattcatgtactgctatcttcattttttttgttttactcttgtcttttttgtatttgagttttgaaacctaatgttgtctcccattgtatcacttttgttcgttatgtacattttatatttctcagtttggtcctggttaatgtgttttgtcatgtcaaatcatatgtccttttttgttagcactgttgaagtctgctgcactttttatgacttcaaacctttcttgctactgctcttcctattctaattttctcttttttatggagtatgaatgcagaaatttcaatatttgttgcggtgcctcaaactatgggcaagaaaaagaggacttcattgccatgtaagtgatttctctacagttgaacataatgttgtcctttattttctataactatgctgttaatgattgcttaatggtatttcagctact

SEQ ID NO: 6027 - DNA, 1102 bp, Zea mays
  misc_feature (1086)..(1086): n is a, c, g, or t
  misc_feature (1098)..(1099): n is a, c, g, or t
aacatcctacgcttatattacattaaaagattatgttgataagattatgctgataagattatgttacatgaaaagattaacaagcaaagttcagactagatccacacaagttgataagatcatgttggattttcatgtcatggcaactatagtagtgctttgcttacctgatgaagaaaactccatgaaaaaaagaactcatgtcctacttcatgacagatttatactattgtttgcttgtttgatgtcaaaaaaccagggaaaagttcattcaaatatagcatccaattttcatcttatagtttccttagctatcttaatgatgacagacgaaatttactgatgaacatgtacaggtttatgagatcatacactagataataccttcccataatctatttctccatttctggtcctgcagaacagcagaccttgtggagggtgttctgcaaggtaggaatgggacagtgttctgctatggagctacaggggctggcaagacctacaccatgcttgggacaatggaaaaccccggggtaatggtgcttgcaataaatgatttgttctccaaggtgacgcagaagtaccactcaattaagctgtcatacctcgagatatacaatgagacggtgagggatttgctgtctcctggtagcccccttaacctgagagaagataagcaggtacatgaactgaaatgcttgaccatgtcttaactattgaaagcaagttttgttcagtgaatttacttactactgagattcttagctgtaagtattggatatggtaaaaggttaatcctgttgtaagtattggatattaccagtggattgagtagtaaaatgcatcagttctaaacacatggcctttttgtactttttctccacatgttttggactttggtaatcctccttaatagctaaccaaaaaagttttgggggcatttcagggaattgttgctgctggtcttacccaaagaagtgtatactccacggatgaggtataagttggttcttaggcatgattagcttgcaatggtttgaagcaaaaatgagaggaacattcttagctgattacatatgctgnttccaggtcatnnagt

SEQ ID NO: 6028 - DNA, 370 bp, Zea mays
catgaggtggtgaagcgagctcttactcttggaatggagagtccagctgctgaagctcttattgtcaagcttctgaaggaagcatctgaagaatgtttagtaagctctagtcagatgatgaaaggattccaccgtgttgctgagagtcttgatgatctcattcttgacataccatctgcaaagtctgaatttcagttgttggtatcaaaagccatttctgagggatggttagattcttcctatgtgaactcaggtgtcaacggaagcgttgaagacgatgaacatgagaagctggctaggtacaagagggaggctgtatccataatacacgaatactttctctctgatgatacaacagaggtcatccgta

SEQ ID NO: 6029 - DNA, 391 bp, Zea mays
cagaaagaagccatgccaaaggctgccttccagtttggggtgaagatgcaggacggcaggaagacgaggaagcagaacaaggaccagaagctcactaatgacctccacaagatcaacaagatcctggctaggaagaagggcgagaaagatggggcggaagatggcggtcactacgacgatgatttacctagctcgaagaaacagcgtggctgaagctgtcatttttcgtttctcctgctggttatggcattctacgggagagttacgatggtgtttagctggcagctgtatcatgatgctttcatttaaggtggcatcaggacataatacatgtcaaaaaactttacaaccgctggtcgatattttaacaggaacagaatgatccttggtg

SEQ ID NO: 6030 - DNA, 547 bp, Zea mays
gcatgggaagaagcacctgcaaggtgaaacttcgtgcctgcccctgctctttacgatcccatcgtgctaatgcagtcagctggaagatgtcgtctggccttctgattttcagcatatatattatccctgaatgtccttctgagtttcatgtttgtctgtgttcacaacacaacgatctggatgcaggagccatggtgaaggttacttgccaggcagatgaccaagcgctagtggcattcggctacaccagaagcaacggcaaatacagcgtggtcctcaagggactgccgattagcagcagcagcagcagcaactacggggctgctgactcgtgtaaggtcgagctacacggagcgccaggaggatcggactgcaacgtgccgatcgagctaaacctgtcagggctcagcgtctactcccgatcaagcgaggaggtggtcttcaaagcgaaccagataatggcgttcgcgtccaagaacgcgtttggctgttcatcgaaaccacagacgcagtcgtcatcatcaccggttcatccctactacaaaaa

SEQ ID NO: 6031 - DNA, 381 bp, Zea mays
cctgacgagagtatctgaatcagacaacatgtagcattgaattcagataaatatagtgtttggcttaatacacttggccctagatgttcatcaggagataacctcttgcagtttctggatgttacctagtctttgtatccctaatggcatagactaaagggcctgctcgtttctgtcggaattcactaggaatcgttccagctgatcgaacctagtataaattagacaaataattcggctagtaatctctagtaatcgttctgggtgtctattccctaggaaccgaacaggccctaaactgtaacctattgttcggttgcgttccatctggtgttgtttagatccaccatccatgaagtcaagcagcatcctatttgaggg

SEQ ID NO: 6032 - DNA, 231 bp, Zea mays
actccatcatgttctcgtccgccccctgcaagaagcccaaggtggaccccgccgccggcgccgacgacatggtcgccagcttcagcaccattgacccgcaggtcagcgcgcgccgcttgccgtgccgtgccgtgccgtgcctagctccggccttaatttgccgctccccggcgtcaaccatcatcgacggcgtggttccatgctgacgggagtgagctgttttttttttgg

SEQ ID NO: 6033 - DNA, 852 bp, Zea mays
aattgttgttgcatgtggcaggtatacttcttatgggtaattttgtgtgtacagttcttgttgtgtcatgcctagattctgaaagttgcaagacatcactttatagtcggacaatatttaacttcatgcagtggtggaaccatcgctggccttgctttaggatccagattgagcagcttaaatacaaaagtatgatctacccttgtctgttatattatctgacactgaactttccgagtaatatcctcttgctggataggttcatgcattctctgtttgtgatgaccctgaatacttctatgactatgtccaaggcctgattgatggacttaattctggtttcgattcacatgatatagttagcatggaaaatgtaagtgcagttcagaattttcattatttatagtaaatcattttggtgtgctaactccaaaaggttcatctgcagtggcttgtctcaacttgtttttacatatattaactacatttcataataaatttttttgatcagtacattagcatttggcattctcttcaacttctccttgacaggctaaggggttaggctatgccatgaacacagctgaggagcttaagtttgtcaaagacatagctgcatcaacaggcattgtccttgatccagtctacaggtgcaacctatgtctgaatcaatgaaatagatttggcacgcggatctatgttttggtctttgctagtcataaactgaataaaaatgcatgcttcattttaatgcagtgggaaggcggtttatggtttgctaaaagacatggctggcaatccagccaaatggaaaggtcgaaaagttctgtttatccacacaggtggtcttct

SEQ ID NO: 6034 - DNA, 528 bp, Zea mays
gacccactggaggggaactcaaagttggctcatcatctgctgatgaatatgaatgaaaagtaagtttgctcaactttcgatgcttatttgttttattatatttggaataaaacactatctaatcggtctgaatttgtttgcaggtaccctttattttttgaaagccgtttgggtgatggactacaaatgtcatttaaattctttgaatccatagtcagcaaccataagatggcagcaaacataaaatcaaatccaattgcatttgtcaaacctggcatatctagaatataccgtcttatccgttcaaatcgaaattccagaaacaaatttgtccactcgatagttcggaaattcgagtctgatagccggagtcgcagcacagttagctttcttgtgtaagtaattgaagtaaaaatacacttgttgacgctctattctttgatgaggtattgactgtcattttgtgtacacattgcagatactgtgccgaagttcttgcctccctgcctttcacatgctccgatgaac

SEQ ID NO: 6035 - DNA, 263 bp, Zea mays
ctgcctctgtctctcggttccgctgccgcttcgtggttcttgcctgctccctcccacaatttttttttttcatttcgattccttggcgggggccatctccctcccgtggtgcttggtgttgttggtggtgtgatgatttatttgtaggttgtggtgttggcttgctcgtgcctcctcctcctcaggccggccgggatggtccattcaattattttcttggcaaacaaaaacaaattgggttggtttggactggccgctgatcg

SEQ ID NO: 6036 - DNA, 377 bp, Zea mays
gctgctgagtcatccgactctagttccataccttactgtcgtatgtggtgtttccacgtatcctcacattttatggtatttgcagaatgccactctgattgatgtatatgccaacttggcatttgctgcgatcaagggcattagatggggctaggtcggtgtcaaatggctctacaacattgtcttctacttcctgctgtgcatcatcaatttcctcatcctgctatacgctgagtaggagggcatggaacctcgtccttatgtatatatttttttgtctggtagataactactgaagttatgcatgattccaccatataaagtattaaaatgatcatttctcctcctgatttttgttgtaacttaacccaactttc

SEQ ID NO: 6037 - DNA, 352 bp, Zea mays
gaagaaggtatgtctctgacctgagccccatcaagattgaggtaccttaaatgtaccaagttaccaatggatttcgggatggcctccactgctgtcttgctcaaatctaatacacgcaagcatgaagctgactccatgagaagatctattgctctgacatttgggcttttgaagagcatcagcgaccttaaacccatctgctgcttcagcgaaattggaccgtccaagctgttttccatgctacacaatgtgagatgccggggctttgacaatgaggtgttcagtttctgctggccataaattaagatactctcatctgctatcaaagcgcgggctagagagcggagaagat

SEQ ID NO: 6038 - DNA, 389 bp, Zea mays
cgggactccagctacggtttccatgttcccggcgagaaggagttctccaaggagcctcctcagctgccgtcccagctctacctcggcgtgctgaattcccggagcaccgaagaaggctgcgcgaggccgaggcacgtcgtcctcgaccatctctacatcgagaagggctggggcgcacagccgctggtggccctcggctacacccacaggttccgctccaagtacgtcacctgcgtcctgtacaaggccatcgagcggtagcctagctaaccattgctgtgctgttgtgggccggcaactatagctagccgtggtggacttggcagttcattcaattcaggtttagaagtctctcctgcataattcgttcatctgctaaactaaagagg

SEQ ID NO: 6039 - DNA, 382 bp, Zea mays
gcgcccagatgtggagaagcgcctcgacaacatgttcttgaactcgccagggcgaccaggctcctggagcgcggcaccttcactgccgaagcttccaaacccggtctgattgtgtcttcggggtcggcgttcaggcgctcacctgccggattccacaacgccgacgggccggatggccactgcgtcgaacacaatcaccgggagcgtgagtttggtcgcatcccgacccaacctcacggcccggtcaagggtaagatccccgatccacacttccaaaggtttggtgttatccctgattttactacctgattttactagaccgcacgaagggcatagggacccagaagattttaagggggctatggtagtcttcctcgtctga

SEQ ID NO: 6040 - DNA, 190 bp, Zea mays
  misc_feature (6)..(6): n is a, c, g, or t
  misc_feature (61)..(62): n is a, c, g, or t
agcgcnggtctcgctgcagctgcggtacgtcagggggaacagctgggacaggacccctggnngcaactccttctcctgcttcttccaggggatgatccgtagattgcgtagcgaaataagaatttgcgaggtagagatcctttcctttcagagcgcgcggtgacgcgatttagatgggtatcctcttttt

SEQ ID NO: 6041 - DNA, 606 bp, Zea mays
taaaatctaactctaataacaggccatccccgatttatcagcatctgcagtcagcaaagcacacggcatccaattagttcaacttgtgggcccaactgtgctctttcaggtaggcctgcactgcttccttgatggccagattcggaaccagctgatgctccttcagaggttctcgcgtcaccgggtcgaaattgccaacctgttacggaaacacagcggttaggttaggcttatggtaaccacatctgctagagcaaaattatgctgtcattttgtgtacatacaaaaagtaaacagcttcacaagtcagcggaagggcacaccttgtggagatgttcaacaagtacagccctctcatatgttacaccactcggtgtgatcactgggtctcggaagatctcgaatgttatctgacagcaaaggtaatcgggcacctaggttttacagcatggcagcagcagtttcagatcacagacatagaaaccaaagagttaacaaaaaaaaacaaagtttggtcagagtatttgctcatacatctgttggtgtatcggcgactgtcgcttggctgaagacctctgatagtagtttaatttgctctgaatactc

SEQ ID NO: 6042 - DNA, 1002 bp, Zea mays
  misc_feature (967)..(969): n is a, c, g, or t
  misc_feature (989)..(990): n is a, c, g, or t
gatataaaaggggcagatgcaagtaaagttattcttgttgttggaataatgactcttcattcttttggagaaggctctggtgtgggtgtttcctttgctggctcaaaagggttctctcagggtcttctagttactatagctatagcagtgcacaacattccagaaggcttagcagtaagcatggttctcgcatctagaggggtgtccccccaaaaggcaatgatgtggagtatcattacatctttaccacaggtgcagttcttaacttcattttctgagttgaaatatgaaataatttcatcattttattgtctttattcttgaaacattacgaaaagcgtaccaacttttgagttaacttgatctatttgcaactatgaagggacaaaaaatcaacctttgttttgtggacttttaaagtaactgtgttttcctctttctcccggtgtctgtgactctatttattcatgttcatgtgcttgtttgtgcaaacgagtgattcagtgtagagtgtggatagacaggataacttgtaaagtggtgtaagattaaggctgtaactttgctgtgtattgatgaacgttgtcctgtgaggcttttattaatttatctatatattcaaattaccaaactgaatcatagtggtagttaatttagtagcactaactgtaatatgatttgcaaggtgcagtgggtgttttcttcagccttcacagccaccttctaagcagtttcctattcttcctggttcctgctagttttgtataagcattatcatgtactaaatctgtgatcctatctgcagttcagtagagttatttcttaggttgtgaatacataattcatctccccatatgcaacggcagtctaattcagtttcagtagcgacattatttacttcgtttttgtttgcaaacccagccaattgttgctgttcctgcattcctctgtgccgatgcattccagnnnggtgcttccctttgtactgnncgcagcaggggc

SEQ ID NO: 6043 - DNA, 635 bp, Zea mays
accatatcaacccctttcccctttagctccttcccaccgatacgcccgccgcgtgaagcattcgttagccgagccgccgcaaccatgtcgtcgttctggggtaagaatcgtttccggggctaccgatgttgctgccaatttccattgtgcttgattctgttggtccgaccggactattgcgtgattcgcaggtgtggaagtgaagcccgggaagccctacactctcacccatggcgacttcgccggccgcctgcgcctcacccaggtccgcttctcctcaatgtctcctcttacaatttgatggccaacgggtttatcacgtcgtatttaggaggcttacagttgtatcttatatctagtgctgtggttgtgggaaatgtgattttctttggattggcaaatggcaacgcaggcgacgctaggggttgatgtcggcaagggggagaaggctaccggcgtgaagaggtgtgtgctacagtgcagtgccgagaacagagatcccgtttttctttgcgtcctcatgccggagcagtcggagacatgccacctggagctagaatttgaggaggaagtcactttctcagtgattgggccaaggagcatccacctcgctggatactatatgaactgatgcg

SEQ ID NO: 6044 - DNA, 1019 bp, Zea mays
  misc_feature (965)..(965): n is a, c, g, or t
aatattgcttttaacaaggtattgctgtttctcacctgcatggtcacaaatttacttagtcaattttgttttaatgggttaaagtatggagaaaatacgttgtacttggcaaaataagctcgaaagtcagaaatacagatatggaattgagtgaaatgtttactattatctggaattctgtagcagttcatactttttctgcaatgactttgtctgcatttgttatctagatccgtgacttaaatgagttgtccagaaaggaggttgatgagataataaaagtgtgcatgaagcaagattgcatatctcctaacgataacatccgtaaaaggtaagctcttaattttctcgaaatctttggttctgacgctgactgattttgtctagctaatccttcaacaatatgttctgtaacagttttttttatttgtttgcaggaggtacattgcaatgatagatttgtgttgcatggctggcaaccgagaccaactcattacccttctactccaaataacggaatgtgccgttactattctcctcattcattttcaggacgagtaagaatgtttatcagtttaactaaaggttctatagcttactattcagttcttacattagaaagtcaataattttctctgtatttgtagtgcttctgcaaaaggtctttcttcattttctgatgaactccttcctgtgctggagagactagagcatttgaaagaggtaaaacacatatatgtactatatactagggctttaggtggctgccatgacccatggggttcactctgctttcatactcttggcacctataaattagacgtttaatgctgggatatgctgctgcattgtttgacaagaaatctatgtatattcttttggttgtacaatagctaaacataaatttaaaagagcagatgctttcacatagattatgtttattaattcgatctggagtattaaancctttttattggacctgcaggacaaagtggacgtagtctgaagtgtccacagtc

SEQ ID NO: 6045 - DNA, 375 bp, Zea mays
tcggcgatgcatcacaagaacagaggaggctgccatgtcgttattaggacctccggcacggggagccatctgcttgctagttgtgtcgtcgtcgatcgtggtcctcagcacggccggtggtctcggatccgatgccactagtaggtccgccgctgcctatctctcacttgacgacgactacggggaggagaacgagagcggcgactcctccttctccttccccgaccccgagacgagttcagcttcaaccgggctagtgttcgggttctacgacgacaagtgcccggacgccgaggagatggtgtcgtccatggtgcggaagctctaccacgcggaccccaacgtcgcagccgcactcgtccgcctcttcttcca

SEQ ID NO: 6046 - DNA, 170 bp, Zea mays
ctttatgtaaatatgtgtatgctaattaataacttcttttattatacagaggttgaattttaatgtggatgttataaatctgagtatgccggatcgtgcaagaccaaaaggacggacaataaaaaatacagaagataggattatgaaactaggggccaaaggaaaaaaaa

SEQ ID NO: 6047 - DNA, 804 bp, Zea mays
gattaaccaaagaataccgcacgccactacttgtaatttccttaacttcgtcaccttactccatgccaagatcaacaactatagtttgtaaattgtaattgtgattatttattaaattggcagctagggattggcctacttgtactgcaaaatcttagtggaatcaacggtgtactgttttatgcaagtagcatcttcaaagctgcaggtaagttgcagtctttatcttgtctgtacttcttttatccgtagtagttggtttgataagttttagcatgatagtttggatacactgtaaatttaattggaaatgatattttgactactgaagcaacctcttacattatttgtttggcagtgtcctttcaagatgtaggaatagaatcatagactgctgattttgaaaccacttgaatgcagttgtttctaaaaaaacccactaggatgcacaaacttaaatttcctcctagatcataataggatcaataaagattataaaatggattaccttttaagttgtaacatagtttatcattcctttcatctctgaaagatggcatttcattgtattttgtaaatttaggtcatttaatgctcagaaatagtccaagtcagataggccctatgtattgttcaaacaaatacataggcgctatgtattaatagtttgagctcatttatcattctttacaacaacgataatatagtaaacttttgtcctatccaaaatctccaggggttacaaacagcgacttggccacctgttcacttggtgctattcaggtgtgtagctaggatgagtat

SEQ ID NO: 6048 - DNA, 398 bp, Zea mays
  misc_feature (392)..(392): n is a, c, g, or t
agagctcaagtgagggtggctccccatcacgcgagagctttggctcggacggggaggagtctagaattgactcggagcttcgacatcttgttgctggggagatggaggccatgaaggtgattgaggaggaagaggagaatgggagtgttgccaacgttgtaccccctgctcctgctgagaatgggaccccagtaaaggaacactcttccagttcgtccaagaagtcgaagaaggcctcaaaatcacagcttgagtctgatgcctctgttggactcaatggaaaggcgtccactgaggaaggtgagagcgaggtcagcaaaccggcaagccgagttggccgacggcggaaatcaaatgccaacccacagagtggaacagaagatgctggtttntgataa

SEQ ID NO: 6049 - DNA, 367 bp, Zea mays
aaaatctcgaagcaatggcaatgtatattccagtgtagaagcaacagtactgtgtaattacaagggagggagcaacatctacagccctgggacacccacattgccaaaaaactaaaatttgctggttttgcttaatgctagctactcctaatggcaaaactggctgtacttaccacccagcctcaggtgtttattgagctgatcaaatccacatcaatttgcatgtacacccgcctgcttgccatctaacttgccagtaatcatgctgcattgcttgcttcttttctcccctggaattgttatggtaaccaccagtctcgccatctgctcaaccaccctgatctcttcggataagatgacagggcta

SEQ ID NO: 6050 - DNA, 374 bp, Zea mays
tagttgacacagaatgagttcgacatggatgtaatacagtgcatccattgatgagacctcctgaacttcaggatattgagagttggtagcggtatattttcactactcaaactgaatcaccaatgtggattaacttgacactggcttcctagtgatccggtttgttgtctgcatcacttcttataagtatgctgccttattcgagagtcagttcaagttttctagttccatattgccttcctcaagacaagctaggaaacaacctattcaattcatacagtcgcatcctccaggcttgcttcatacatgcattaagcttaggaagaaggaaatgaagcaacctcaagaggacaaaggagctagccaatgcaaga

SEQ ID NO: 6051 - DNA, 847 bp, Zea mays
gcttatctttccacgcacaaatttcataattgtttttcgcattgcagaagaactcactttccacagttacaaagatttctagaacatttagtaagttctattcgtacaggatataatggaatatgtattcagattgttttctctaggaaaaataaaattgaaacaaatgtgtatgataaaaaaactttattaaagattgattcgtcgttagcaaactcttataaagtggcattagtatgtggaggaaggtgatcatggaattttttgcatgtattcagtggactaatgcacttaaattgatctttagtatcagcatccaacaaagtagaatgtaattctacaatatgcgagataagatatcttccattccataaactctagttatgaccagcacaatgcaatattgtttttctttccttacatttattgtaggcttagtgaataagatgctatgaattctgaattgttgtaaagctattttccagaatgacagggcctctatagttggagatgccattgaatacatcaatgagcttaatagaacagtgaaagaactgaagatcctacttgaaaagaagaggaacagcgctgacaggaggaagatactgaagttggatgaggaggcagctgatgatggggaaagttcttcaatgcagccagtgagtgatgatcaaaacaatcagatgaatgggactataaggagctcctgggttcaaaggaggtccaaggagtgtgacgttgatgtccgcatagtcgatgatgaaataaatatcaaattcacagagaagaagagagccaactctttgctttgtgctgcaaaggttctagaggagtttcatcttgagct

SEQ ID NO: 6052 - DNA, 262 bp, Zea mays
  misc_feature (204)..(204): n is a, c, g, or t
acgctgtgaacatcatgcaggaggcgcacgtgaatgggctgtcagtggtgattgtctgttcccagtccgaggctgaggagcactgcacgtcgctcaggggcaacggcctccggagctcgatcgagcccgcgagtggtggctgctgaggttcgagacttgggggtataccttgttttgccagcgtatagtttgtaaatacccagngtatcaagctaaagctgaaacggattggttatatgcacttatcgatacacgaagctga

SEQ ID NO: 6053 - DNA, 374 bp, Zea mays
cgggctggaggttcatgtgaagtggctccagagtaacttcaccttcatggaagagaaaacttgatgccaggtgcaggtacttgttcctgtgcacgcatattcagcacccaagtatatcgggcgcctgaagaaaaccttgctctgtacatggaaaccgaaaaaaaaggtaaatatttgcttgcctcagtgctcccttccgagttccgaagcttgtacgctattgctgcacaattccggcattcattggctcaagtgaatagcgatgtaaatgtattttaagggaagccaactttgtaccagtgacgatctgattccgaaattatcgaacagattgccaagttcagtaactctgcatgtcagatttgctgaaactg

SEQ ID NO: 6054 - DNA, 372 bp, Zea mays
ttgtgtgggtgacacaaacacagacacattcatcacagcaatgcatgcatgcaactgatgcagatgagacgtcgtcgacgactgcgtttgttttatttttacagtaccaagcaagcattctctctcgttttggttttggttggatgagacgtcgacgagtggctcagttcaggagttgttgttgtcagcggcgtgcactgcgtaggacggctccggctccggctccgcagcgacggcgggtggtggcacaacgccaacggtatccactttgccgtcgttcttggggatgatgaggccgtatccgccttccttcctgcggtagaggatgttcacctgccccgtggcctcgtccctgaagcagtagaagtcgtg

SEQ ID NO: 6055 - DNA, 385 bp, Zea mays
ctatcacagaaccgatatagagattgatgtgtttgccgtgcgctccggcagcagcgattccgacaggccccacggcggtcgcaacccagccagcggcgagaaccctgggacaaggacaattactagcgtcggcgctacagcaagcggatcaggccaagaggacctgcttgtggccaccaatattacagaggcgtgtaagagtgaatccagtctcgctgctccgccatcgaagccgtctgtatctttttgttttgttttggtcggagtttatttgctctagagagaccagtcacctggtatggaacatctactaatttcagagaattttgcatgttcgtctcggtgtgtcgttacacaatttgcggatgttgaaacgacactgaat

SEQ ID NO: 6056 - DNA, 479 bp, Zea mays
tacttagcaaccaaacaacaccttagataccgagaacaatacctagcattatgaaatttgccacatttagtttaacagcagtagcatcatgtgtttactgatgggcatcacccagtgcttatttacaaatttggccagatgcaaaggatttagcacgttgtaaccgagcattcatttaccaatgctaattctcaacagggagaacatcagtgaccggcatcctattcaggcataggcagtgatggcagggagtttctgtggatgcacaatcaaacgagtaagttcatgtgtcgttgcagttacatttttatgacatcataacgtgggcaagaagagtaaatttaccttgagcgcatgtcattgttaattatccttggcatgggaaaggtctttctggtcaggcctgttctcttctagctttccatttgttgcttcttctagtgccttattctgtttcaacacctcttccaatttcttcc

SEQ ID NO: 6057 - DNA, 488 bp, Zea mays
acatacatctataatcttctttcgtgttttctttgactctttctgataagctcatagatctaataagttattggtaactctgaatgttttctcctcagctgaatgtccgaaactactgggaagcaattggagtcatcgctgctcacaaggcaggtgtcaatccacatgctcttagaagacgagggattgatcatcttaagagccctcaacgatcatattctgcctactctgcaagtcctaaaccatctgcccgtcctccagtgcacgataaagtacagagacagcagctagttaggcaaatttagtactaaaaagagcactagcagcagtagaaattactttagatagtcgtgattaggaacttccaaaattttgaagcccagatacatatttttcagaccgtcctgaagtgtaggaccatagcatcacacgaattttgtcgtgttatccagtctggacttcgctgacatgagtctttctccactgcc

SEQ ID NO: 6058 - DNA, 373 bp, Zea mays
cccggattgatgaagctcctgcatgcattgcatgcggagtcttcaaggggatttcagctggcactcatgcattcaagtaaaggctccaattcgagataccggtgcgtttcaataagcaggttcaacagtatctttcgttaaaaaaaacagctctgcttttcgggcggctgctatgtcgcactgcacagtgtggcgtagcgcagcgatggcaagctaatgcctaagaaaaaaaaacatacgtgcatatagaaaccactgatattagtgtagacgctgacaacctacggagaaatttgtaatggcagttcagggatgtaaatctttttacgaggcaacaggtcacagttcttattgtctggtagtgatagcagtg

SEQ ID NO: 6059 - DNA, 747 bp, Zea mays
agacattgaggtaacagtgaaaactcaattattctccttccgccccactgcattaccagcaagagtccactagtgtcatttccctgagtctagtattatttcacccatacttcattgttcccttcgttttatttagttttttttccatctttcaacaatttcttgagtaccacagttgttttctctctctttaatgaatgttaagttataactgaattttaacatggagtttccgttttcaaatccattgtacagatagaagctccaaaaaagaagagcaaacctgggaaatctgtctatgcaaaagccacagatactggcatcgatcctgagacagctgctaaaagacttaaccttgactgggactctgctgctgatatagatggcgaagaggaggacgatgatgaaactgaagtgccgtctgcagtggtaagtttgtctttgaaagtactccagcaaattttatactcatggctattgtgggtaaagcaagcaaaaagaacaactttcaactaaatgctcataccttaatgttcttataccacttattttaacgtgtttttttttgttttgttctgcagggatatggtgccttgtatttgttgacagcttttccggttattattgggatctcagtcgtcctaattcttttctacaattctctgcagtagctcctccccttcttgagtgagaatgtgagatgttgctgcattcttgtaaatctgagttacaaggctagttaatcag

SEQ ID NO: 6060 - DNA, 333 bp, Zea mays
atgataccgaacggcccatcgtaggcatcccttgaacctagtcttaggagaaggatgacggtcctctcaaaggttccgttgccatcaagctcttcagtggcgaccaacacacatccagactctggcatagggatggaatgagcccacttccgaggaagacgatatgctgctccatcctgacctgtctgcactagactatttgcatctaatgtttgctcctagtttggatgcatgacaaataacaaattagcaaaaaaaaagtaatgagggacttcttaacaaaaataccaattagcttcaggcagagacgaggctactgctttgctaaggcct

SEQ ID NO: 6061 - DNA, 295 bp, Zea mays
ttttttctcgaaaaaacgcaggaggactatgaaagggtttggagatcttgggctccaccaaaatgttgttttttcatttggttggtggcccaaaatagatgttggacagctgatcgcttggcaaaaaggggattgaatcaccctatcagatgtcctttatgtgaccagcaaggggaaaccctgaaccacttgcttgtgaattgtgtcttctcaaggattttctggtacaacctgctaataaagttcgggctgcatagtttagccccacagccagatgcagtctcttttatggatt

SEQ ID NO: 6062 - DNA, 356 bp, Zea mays
tgctgcccttcttcaacgccgtgctcggcctcatcggcgcgctcggcttctggccgctctccgtctacttccccgtcagcatgcacatggccaggctcaacatccgacgcggagagatccgctggtggatgctgcaggccatgagcttcgtctgcctcctcatctccgtcgcagccagcatcggatccgtgcacgacatcgtgcacaacctcaaggccgccgcgccattcaacactgcaaactgattaataaacatgcatttactagtatatatacggatcggatcggaggagtgatgggttaattagtttcttaattagctttggctactatatctatcagtatcagagtcagag

SEQ ID NO: 6063 - DNA, 367 bp, Zea mays
  misc_feature (358)..(359): n is a, c, g, or t
caggggcctcgccgactgggacgaggcggagaaggagcacctcggcgaggagctctccgacgtgctgctctacctggtccgcctctccgacatgtgcggcgtcgacctcggcgacgccgccctcaggaagatcgtcaagaacgccgtcaagtacccggcgccgtccaaggaacaaggcgcctgatgatgacgaacaataccacctgtgatgccttctttgatgctttgggatagctggtgcctggtagagaaccaggcagcgagatatatgaactgatgcttggaccctttttccccctttttttgcggtgcatgctcgaaggttaataattgatacaattattgctcggctgatatnntagcttta

SEQ ID NO: 6064 - DNA, 740 bp, Zea mays
  misc_feature (16)..(18): n is a, c, g, or t
gtaaattcccatcatnnngagtcatcgtcatcatccatagaatccataccctcttcatcagaatcctattggaaatttaaaattagacacaacaaaacaaaattaaactggtgagatcaagtttatttaacagtgtaaacagaacatgcaaaaagtgtatctgcgttctgcagaagcaaaaggaacagctactgatacttactcctttacttctggagctctccaactccgactgccatttttcgagaaaatttgcaaattcagggtcctacaaacaagacaaatatttaaagtctatattgaaatcactataagcaatgtacatcacaaccctagaatttcacttgaaattgtactggcatttcatatatgtttcttatttgacagtcgcagataattcgaagcaccttgaatagatcgtgacatcaaaaactcatggattagtgcagaatctctacataactacaaccacaaactgtgtctaaaaatacacacactgggtgcacttcaattactactttattaaatgaaaaggtccagaagttcagagctgagctgacctaacctaaaaatgagcttagtagcttacccaattggttgagcagaaagtatacagttacatactatgatacaattaacactatcagctatagcctacagaaatttcgccaacatttttctgtgcacaaattttcttccagaccccattaacattatatgatgagctctgtatgctgaaa

SEQ ID NO: 6065 - DNA, 361 bp, Zea mays
cactgcatgatcccaatcccattcggatttcctcacgacgaattaatgaagaagggcgtgtgagtgtgagggagaaagttatacttgtatgtatttttttttcagttttattttgtcgtttcgttttcctttctttttcccagtaggttgccgtacgtgagtagacaatgctggcttttggaattcagagatgtagtatgtggtgtaaaatgaattccaaaagctagcagtgcctaccctatttgttgtctagttcttttatcttccttggcgttctagacgcccgtccggggaggtagaacggacagacgaacccaacagtgtgcaagatcacatgactagagaatcatcgaccaatgca

SEQ ID NO: 6066 - DNA, 388 bp, Zea mays
ccgtagttgacccacttcttgcccgttgcattcgtggcgtgcagtgctggtctctcttcgccggtgacacttttgtcctgttgccggcggtggttgggttattgcagtggccacggcggagcacgaggttttgtctttttcagcatgtgctacgagggttgggccgttggggattgtaagcgtgtacggcagaaaggagagatccataatggacatgcgtgggcctggactttacatgtactcctacttagggagcataagtgggccacgagcccatggacaaggactcgtgattctgtcttaacgttacgtatacctgcttcgatgcgtaccggaaatgattcaaacttgcgctcccttccctccaacttcaacgcatatgataaaa

SEQ ID NO: 6067 - DNA, 390 bp, Zea mays
gcctccgccgactagggagctatcagtggcagactttcgatgtggtgcattatttttcgcttagctttaatccgtaccggcttctactgcttatacaatgttttgtctttatgaattgcagctgcagcagtccaaacaactgactttaagattgaagcgaacatagtctggaactatttgtttcaaatacctcgcagagaaactcaaaccacacacgcatataaactgtttcaaataccttcttgatcaaaaggtccaatctactcatcaggtagggtttcaggtcagccacatcttgagaccatagtcatataggctggaactagctgcacttttcaccttttcgcaaaggcaccacttacatgaacatggccattattaaagcctaaa

SEQ ID NO: 6068 - DNA, 456 bp, Zea mays
tcatctgcagtagaggaggatcaagacgacgatgaggaagaagagtgggttgaagttgacccaagtgagatggagttggctgatgagtctacttcaaacatgcaagaagatgagcactcctcaaaatcagatgatgacatggatgaccttgaagagttggatatctcgtcgtgtttcatgtgtgacctcaagcatgacaccatagaagactgcatggtccatatgcataagaagcatgggtttttcatacctgacagtgaatacttgaaggatcccagtggtcttcttacttatgttggactgaaggtatacatttttcaccagtgtaatatcgaatgccatatgtgtgcaagcatgctgtttaatcttcacgttgaattggttatcctacctgcaggtgaagcgtgattttatctgcctctactgcaatgacagatgccagtccttcttcagtct

SEQ ID NO: 6069 - DNA, 372 bp, Zea mays
ctcgggcgcccgcccggccatgggatgggatggggaggcgttgcagcagcaatttatgtgctacctacgtactagtatttattataattgttattactaacaacaacgactggtagtatcgatcagagaccgacgctattcgatcgttggttcgtttcattgtcctttccttccttgctagctggtggtgtatcgaccatctaaatctaacaggacacgtggacctggacggcaagagatgtccagtccagcagtgtggaacgtttgttgctttgtctatcattaattgctataagtttgtttcatatatacatatatactactgtaattgcagtatattgaataatgccaaatcaagcgggacaagacgtg

SEQ ID NO: 6070 - DNA, 861 bp, Zea mays
  misc_feature (25)..(25): n is a, c, g, or t
tactgctggagctggtctccctgtncacatgaaaggtgaactaaacacagctttcataggactgggggatgacggtggatatggtggtggctgggttcctttggcagctcttaaaaaggtgctgagagggatcctaaagtacctcggagttctatggttgtttgcacaattgcctgaacttttgaaagaaatactaggatcaatcttaaaggacaatgaaggtgctctcttgaatttggatcaagagcagcctgcactccggttctatgtcgggtaagaaaatataaactggcaagtatcccttgttttctagcatcatatttaaagtaaatgctattcatttttttttggctgcgcaattaagattgaggatctacatgaaagtatccttaattttctattgtgcatggaagctttggtgcttagcgatattgagttccctgaccttcttatggaaatagtactttgtttatatctgctgctcttcggattatatattcattcatctattacatgttactagtgtgcgtcaaatatttactgattccttaatactatacttaattgtttactgaatataagtggtgttcttttatttaatttgatgctatcagctcataattggttgagcttaggctagccttataagatgaaaaattggtgttcaaaatgactcgtcttgtttttcctgagttgagtattttcatttgggattgctagtaaattggtacctgatttcataattgcagaggatatgtatttgcagtaagtgtacatcgggttcaactgcttctacaagttttgagtgtgaaaagatttcaccaccagcaacagcagcagcaggctcaaagcaatgctcag

SEQ ID NO: 6071 - DNA, 730 bp, Zea mays
ttcgtcacttatgcatatttttaattttaagttttgtgtaagtcattaaattcttcccctatatttctaagattcattctaattacttgcatggtggtcatacaagaattccacatgtaaccggttaaggcctgttcggttttcacggattggagctccggaatgattcgtagcctaatttatataaattttgatgagctagaaccaatcccgtttcattcctcgaacgggccctaagggcttgttcggttagacgggattaaatcctctcctccaatctccctcattccacctctaatcgaacaagttctaactgtttttggaacactgatttgtaccactgcaggaatatcccctctctctctctgttagatgagcttttaaacagattttactgaatttccccctttcccgtctataaatattttaacgttcctttgtaatgtatacattgcggatggaatatagcccttcctgttttctgatcaactgaattttctgtttcgttcctcaggattgaggtttagcaatctgtactgtgaccctctaatcatccccggcggtcacaagatcacggcaaggcagcggtggcaaccaacaccgatgcagctgcagatcctggagagcatcttcgaccagggcaacgggacaccgagcaagcagaagataaaggagataacagcggagctctcgcagcacggccagatctcggagacgaacgtgtacaact

SEQ ID NO: 6072 - DNA, 401 bp, Zea mays
cgagttgccaaagctttcgaacttgtatttgcagggtaaccagtttagcggttttattccgttctccatcagttcatcaaaggatctaatcgagctcaacctgggtgataatgctctgactggtaacatcccaaccatgccaaccactgtgaccacatctcttctgaatcttagtcataaccttcttgacgggtctattccttcaaacatcaactctttaggtgaactagagattcttgatctttctcacaatgccctgtctggtgctgtgccatcttcactatggagcctgcaaagcctgacactgctggacctttcctataataatctgtctgggtctattcctagattcggtccaagtcaaactgtagatattgtcggaaatcctggtcttgtaattg

SEQ ID NO: 6073 - DNA, 392 bp, Zea mays
gggggagttctggtgccgagttgctagatgaaaatatttcttcagaaggggaaagttcggacgatgagtctgatggttttgactccgatgatgagatggacttgacacctgcccctcctggaacagaagaaaatatggagggttcatctgttgcaaacaaacatgatgccgatggagataccaaagaggaagatgacgcatctgatgatgaagatggtacggatcaagatgactccaacagtgatagtgatgaactagacgatgactctgatgtggatgtgggtactgatatatctgatgaagacgaaggtgacgacggtgaactgaaagaaagcataaatggttcagaggatgaagctttagaccagaatgaagacagcgaagaggaagaa

SEQ ID NO: 6074 - DNA, 809 bp, Zea mays
agattagtgttgttcctggtgcaagcagaagagggcagagagaagttgttatgatgtatggctcttctttggcattgcctttgctattggattcacaagtcatgtagcaactttctttcttgtgttcatgacgtgtttcttttcaggcctggtggaagtgggtttggacaaggtgcatctggcccatctagttcgcttcctgggtaggttctcatggctagatattttataggctaatcacatgcaaaaagctttcctcctataacatgtaaaagtgttgcaggaatagccatttcaagctagtcaatttataattgccaaaacttgtgatcccccctatttttaaaaccgcatatggttgcgggctgtggacttgtgcgctgtgtcgtatttaagtgtggcattacctaccaacatggcgcattagactcagtagtaactaactacaccaatgtaacatgaactaaaaagttttatgtttgttacgccttcaatttttttggcaacaaaaacacctgcaattactagacatcattttcatggttattgtgctatgtccaggtggaagcgtggaggctttgttcgaagaggacaagggcgtgttagttttcctcaaagagggcgagggcaagtgcgcagccgtggccgtggccgtggccgcagtagctttgttcagagccgtggacgtggctatgtgcgcaggggtaatgcagagaaatcagccaaacaattggacaaggaacttgacaactacaactctggtgcgatgaatgtcgactaagttaatccatcgtgacatcattcaatcc

SEQ ID NO: 6075 - DNA, 533 bp, Zea mays
tggctgttacatctgctgttctgtgtatatattcaatttttgggaggaaacaagcccagccttttctgactgagtgctgtgtttgtaacggtgataatgcaggtcattttggtcggccatagttgcggaggtgcgagtgtctcgtatgcactggagcagtacccccgaaagatctcaaaggcggtgtttcttactgctacaatggtaaaggatggccagaggccctttgacgtgttctcggaggaagtacggaatcactctctataatctacgtttacattttccatttgctgttttcttgcaaaggggctcacgttgacctacattcgacagctccggtcggcggatgttttcttgcaagagtcacagtttctagtctatggaaatgggaaggacaagcctcctactgggctgatgttcgataagcagcagatcaaggggctgtatttcaaccaaaccccttccaaggtacattgtgttctaccattatgcaaccagaaccagttgatagacgtactgtactgtgtccaccc

SEQ ID NO: 6076 - DNA, 485 bp, Zea mays
gcttctttggggggaagcaagacgagggccttgctaaagctgtagaaactgttctgaagaaagcaactgactgtgagttggcatccattgatgctatggctgcagcagcccattccttggtgatccctcttgcaatatttagagaaaggttgggtattgaggaggccattgagttgatcaggcttgaagaagaccaccaggtgtttatcccgcgaccatcatgttcatccattgtttagaatcatttgccctttatttcgccttaaggtttctgaatttacccaggttgatcgatggggcttggtggaaggaggtcatgacgttgatatcgcggatcttaaagtgcagatgtcctcggctgttgtatttcttggactttcacggggactgtgaaccatcctgtttcttacctatatgttggttagttgtttatttccaagcttgtatgaatctgagaccaagagttgtagagaataattgccgcg

SEQ ID NO: 6077 - DNA, 350 bp, Zea mays
aaacaaacttggagatcagattattggtcgcactgtaaaggttggtctcattatagacacctctgttgcgaatgcagtcataacaatgtattccaagtgcggaaggattttagaagctcgaaaggtatttgacttcctgaacgtgaaggatattgtatcttggaatgccatgatcactggttattcacagcacggaatgggaaaacaagccatagagatctttgatgacatacttaaaagaggtgcaaagccagactacataagctatgttgcagttctgtcaggctgcagccactctggactcgtgcaggaggggaaattttattttgatatgatgaagagggcccata

SEQ ID NO: 6078 - DNA, 520 bp, Zea mays
ctgagctatatctacgaagggaacacgtacctcagccgtctgagctcagcaccaaatgccttgcagcatggagagaggggtttgcagaacatcgttcggtttttcgggtgcccgtatccagtctccagagctgtgttgcgactgcggtactccaacgctgccaagttgcaggatgattcagggtcgaaacttctttagagaggtatggatcaatagatcagtcaaaatcctctgttttttttatttatgttccttcttataaatcagtcatggtgtaacagacagtttcgtttacattacatgtcggtttcagtgctatactctcgattaagacgccgtttcgagtcgctgagacagttctgttctgttactcggaaattgtgatttgtgaacctcactcagttgaccaccggcagatttgtctgaataactgaagccgttttaggatgcagcactcatgacaacccgtgttcgatctggaggaaggattagttggcaacacagctatcccagttttcac

SEQ ID NO: 6079 - DNA, 364 bp, Zea mays
aagtttcttacatggtttagcttacgtgccaccctgcaagagagaaagatagttagcgtatatgtggatactcttatcgaggaccctgtcagtctctctggccagctcgtcgacagcttctcggagaggatatatagcaaaaagcggccttccatgccttctggtttctgcatggatctgtggcattaaggaactgcagggtcttaccgttcgctttgtagggagcatattcggcccattcttttgttgcagatcgttgcattgattcttcattggaaatttagctgaagtatttgacttgcacatcttcattgaaactttccttggtgatgacagtaggttatgttatcgtcgggcaacttct

SEQ ID NO: 6080 - DNA, 1008 bp, Zea mays
  misc_feature (742)..(742): n is a, c, g, or t
  misc_feature (744)..(744): n is a, c, g, or t
gtcgttgtctcgttctctccttccatgacctgaaacaaagctggctcttgctaagattttctcttcagcaacgcatagagacgcattcaggatgccgaatgcacttgggattgcgtatttgtctaaccatgtgaagttagcaggcagaagtcatgcgcttacctcttgagatacgccttgtgcaccgtacttgtcgtcccagaacatcgttgctatgcggtatatttgagttatgctcaaaacctgtgaaaacacacagcatttcatacatacttgctagcttgaagaaaacctaagcacttataagatgctttcgttgcagcttacagggcaaatctcatccgtaatttcctccaggattttgtgtgatttctgatgcaaaacctgtgatttggattcatctaataagtagacagatcaaactagtatagcagttaaaataactgcatgtttttcatgcataccaggaacccgactgcctgcctaatgtgttgcagttcatcccaggatgtccctacatactgcatcatggagaatgtttcagcttaattagcactctcttactgattatagtttttgtcttgttaaaaaattactaaggcttcggtttgattgaggggattggtggggattaaatccctttctattcaaaattgaatagcgatagagaattaatcccctttaatcctgctcaatccacccgtaatcgaacatgtactaagagagagaaaagagttattcncntcttcagttgtcctagagcaccactgctccaggtcttgtaaaccagcctttaagaactccccattgctaaaagagcagcattcccgacgaagcagcaagctaaacaaaaaaaggtagaaatttgatacagtacggaatcaaccatgtaaagcatgtgccaaggatatttttggtatcccatatgaactgtgcagtcaagtttttctaagaattggaatgagatatagcagcacctgttgaagagttgcacattcaagtagcaaa

SEQ ID NO: 6081 - DNA, 446 bp, Zea mays
tctgcttctcttgtattcagctcatgatcgatcgagatgtctgtttctgttaggtatttgtatgctgacctgtacgcctcggccatgtggaccggcgcggaggctccagagagcagtggcaactacacctccgctctgatccccttcagctgctccaaggagtctccgataccatgcgacgccgctgctgggagccctctcccgtcgcttggctacgtatactcgttcggcgaggacaacagcaaggacacgtatgtgttggccagcaaaggcgtctaccgagttgtgaggcccagcctctgcagctatacttgcccggcagagacacaagagacatcgccgcctgctgctccttcatccaacaaggcttccatggcggagatgcgaatgggaatgcttttggtgtctgtcattgtggtttgggttttggtaacataggatcatgc

SEQ ID NO: 6082 - DNA, 531 bp, Zea mays
gcttttcgctgctagctaccgcccgcccggtgtctgtcgatctgtgacgaccgccaagccgaagccaaaaaggcagcagtagtcgtcaagttcatcgatctcggcatcgacgaccgcccggccgtccatggcgcggggcaaggtgcagctgcggcgcatcgagaacccggtgcaccggcaggtgaccttctgcaagcgccgcgccgggctgctcaaaaaggcccgggagctctccgtcctctgcgacgcccacgtcggcatcatcgtcttctccgcgcacggcaagctctacgacctcgccaccaccgggtacgtacgtacaacgtcgccccacgcccacgcacgcatctatccaactatccaagcagcgcaggctctgctagctgtgctggagactgctggtcgatgacgagaggtgatcatccgacgactgctgcaggaccatggaagagctgatcgagaggtacaggactgccagcagcggagaagcagccgacggctgcggcgacaataacagaatggacccaaagc

SEQ ID NO: 6083 - DNA, 845 bp, Zea mays
  misc_feature (839)..(841): n is a, c, g, or t
gctaggctcctgtggctgaataatgtctcatatccaggtccaacctttaaacttcctggactatggtgctttgcttgaacatgtttgactatgagttgccttacttcttgtggagaagacgcatttgaatttatttacctaaacaaaatcttacctgtgcatcttttgatagctgtttaggccctgctgaaatgtgattttctttaattattggaaaaatactaagtttgcaaaaaaaaaagtttgtcaaacttctaggtgtttggatgtaacaaacctttttaaaaccatagtctaagttttagaaactccaatttataatttttttttcaaaccacggttttgcgtgtctttggcttataaaaccccaatttcttgataccatagctttctaaaagccaaaacatccaaacagccctttagttccatatttgtttcttttttccttctgtgcgttaattattcctatatgttcaggagctatgtacaacaatggataatcatgacatagtttttccgaacatacaagatacacctcataccatacatgattgtgtcttgcggctcattaaatttctgaagcaatcataatgttcacgtactcttgtttcttttgcagcatgagatagactatgtaggtactgatgcacatgtctccccaagagtacctcagcatcctcagattgcaaatccattcgccaattcagttgtcccacctggaactggtttgtatgggcaatcagcagctgggtttgctcctagacccagtgtcactgaccagtcgaagaatacaatattctctaatgccttatcaagcccagtgcgcaggagtctccagnnntctc

SEQ ID NO: 6084 - DNA, 392 bp, Zea mays
ggggttgctccatactaatataataataatcactcctacttacgtgctcaagcttataatattagagtagcaaagctgctacgtactgttagggctctatggactactacgaagctatggacgtgtttggtaggctgcatatgggccggccaggctggtaagatacagcgtacgcttgtttggttgcttgtctctgtatctggtgggctgaggggcggtgtttggttgcctgtatgtctgtgctcacctgcactgcgggatgcaacatctcgctgtgagccaggctgtggagaaacgagtttcatttctgtatctcgggagccaggccctggctagcctgtttggagcgggcaggctccactgcgaaacgaaccaaacacgccctatatgta

SEQ ID NO: 6085 - DNA, 373 bp, Zea mays
gattgtggcagataaattgttcttgtatcgactttttccttcttgcattgttattattgccttgcaaagcatgaaagctaaatctggtgacaggaaatatcccaatggcagagataacttagtggcagtagcgtccaatgtcaccatgcaggatgtttgttttaaaggtggtactttattgaagctttataatagattgtgccctttttctgaatgtaatattggagaacatcttatgtgaaatgtatggatgatggttgcaaatcctgatattgaatagaacttcctttttcgaattatcatatacaaattaatggatatatttgcttatgttttcctcccaaacacgcttcagcagtggtaattatcatga

SEQ ID NO: 6086 - DNA, 1183 bp, Zea mays
ctcttttctgaatggccgtggatgatgaacgtcaggtgtgcgtttgcactatgaggtttttacctaatttcccaaaaagaatgaaataaaaaatgaataaaatagaaacaaggcattctgatttgacattagcatttactgtacagagacagaggatacttcatcttctccctgaatacttaataatatttgtactttgtcgctatatttgtttatgtggcagcggggactggtaaaactgtttcctatatgtcatagtagaatggaagagattgttcccaaagatgctcctgtcaggtgatcaaggccttcctataagttcattgctgtttgaaaattccaactcatttggtactataattcaacaaaacagtttcctggaaaagtggaaatgccagttcaagtagtattaataacaatcctagacttgctgattcactgtaacgcattcattctaggcttgttgctttcaacttgggctaccttccaggaggagataaaactgtaatcacagtgcctaggacaactgagttagcattgcgagctgccagcagaattctcagttctgggggactcataagtgttcttgtatacattgggcatccaggtggaaggtaaacaccagttgcaaacattgtagtctatccatttagaaaagaatgcaattgtagcacaatgtctagttaaatcatcgtaagtttgactaactatgtataaaagaatatcgatattatgatatcgaataaacatcattagatttgtcatgatatatgttttcatattgtacctattcggtgccataaaatttgatacttttacatatatatttgattattttgatgttttaacaaagaatgcacctagaattgcattccttttttagacagagatacccatgtggtgtaatattatttatttatctgtcaccaaaattatgtatggtgtactcacaactctagattctgaacaaggaataattcttgtatgaataaaaaaacgtttgctgtttgttctgcatgatctgacttgccaccacaaccttgttgtttaacagaacactgaaatctggtcaaatatggcttaaagaagtggctgcgggcttattgattttcttctctctgatccctagggatgaactcgatgttgttgaatcattttcatcaagccttcctgggatacctgg

SEQ ID NO: 6087 - DNA, 366 bp, Zea mays
  misc_feature (358)..(362): n is a, c, g, or t
tacgagtctcagctgatgaagattaataggtgcagagaggtcggactgaagtgcattgagcgggatccgaaacgtcggcctaccatgggaaatgtccttgagatgctaagtagctagagtgacaggcaccgatttgaggtgttctcggttaggagtggattgaagcggattagagataatcaaatctcttgctagtcaaaactgaatagaaatgggtttactttccctcaatcccctcctacctatgcaaccaaacaaggccttatgggtttcaacaatttggtttgatgtattgtcacaaattgatcatttgtaacattcaagatttatgcgcaaatgtattggcgtgtggattagnnnnnagtt

SEQ ID NO: 6088 - DNA, 607 bp, Zea mays
gaggcagatggatccttttctccacagctaatgcatggcaatgaagatgaagatgcaattgatcctgaagaggacaaagctgagctggtagagtcctgttttttatttcttattaaaatagaaacgtgattggaactgtaatagttatttgctgaaatgcagttaactgagtagtttaattgtcaagtacagatcattagtaaccagactccaatttatgcaacaaagtaggctaaccaacaatattaggacaaaaagttctactgatatttttttcattaggacaacctttcaaactgctgcaggcctccctgcatctccttcattgattcatttagctcccatcatttttaccctaagagagggcttaaatttgagggctttcaagtgttcatatacaaacacaatgagtgaatgtttttcttacgaacaagttattaggattcattttatgagttgattagataattaggatgagggtgacaattcatacttaatgcttttatataattatctccaggaccgaaaacgtgaagctgtagttttggagcatcaaagaaaagttcaggaagccatgaaaacaaaggcaagagtacctgatgagatg

SEQ ID NO: 6089 - DNA, 409 bp, Zea mays
tgtgtgtagtgtatatatataaagtcgtgccacccatctaccctgcatcgaacaccaatggcattcttgcattgaaggaaccctccctccacctccaccgcccgagagcgagcggccggacggggttttggttgggcatggctgccccggcgatgctccaagtggtgatcctcgccgcggtcctccttctcccgttcctcagcgtgccgggcgccgaggcacagaccaagaagttctgcctcacgcagttcgccatcgctagccaggcctgcgccatcctgccacccaccagtcctgagcaccaccaccatcatcacgatgacgaggacaatgacgaggacaacgacgaagatgaggacgaagacgaggacaacgatgaagatgaagacgaggacaatgacgacgatag

SEQ ID NO: 6090 - DNA, 447 bp, Zea mays
ccgatggcgtccgaaggcggcatgggtccgcagatggctggcatggcgccgacaagcagcccgccggtgagttcagggccgccgacggcaggttcacacgtcggcagtgacgctcttgcacaggtcgcttatctctgcctcgtcgccagcctgctgtggtagactggtacgtagatgggctgcctgcgactgcgagacagctagaggatactctagcagagcttgttccgaaaggggattcttttgtacggaagcagtcagttattttttctgcgcggcgtgtaattttttttgtcatccttcgttctatctgtcgtccatcatgtattatcgcgaactcatgcaaatacggagtactgtattcgtctacgaaggaaggtgacaatggccggggattgtgtaggatcggagctattactgtaggtctaattgaggacgacacgagat

SEQ ID NO: 6091 - DNA, 474 bp, Zea mays
cgcgttctacctctatgccgccatcgccgccgcgtcgttcgtgttcgtgtacgcctgcctgccggagaccaggggccggagcctcgaggacatggaagagctcttccacaccaagtgatttcgtatgtgctgatccaacaaccatttggttcaattctcgattcagtggcaatgcagattttgccattgttggagctggttttgagcttggtcgttatcatcatggcacatgcgtatacaattgcaagattatattgaaatcgattgattgagccggttggcgtcgacatgggaacacgtgcatatatagaattgaagcattgtaaatttgcattctttgacgaaatagattttttcttcaaagggaacataacagaggcctttagtacacatactacataatcatggccatttattttagattcaacatttcttttatatctatctcttcgtacacagaacaaggtgaaagtg

SEQ ID NO: 6092 - DNA, 694 bp, Zea mays
  misc_feature (587)..(589): n is a, c, g, or t
  misc_feature (591)..(600): n is a, c, g, or t
  misc_feature (602)..(620): n is a, c, g, or t
  misc_feature (634)..(637): n is a, c, g, or t
  misc_feature (658)..(659): n is a, c, g, or t
  misc_feature (662)..(666): n is a, c, g, or t
  misc_feature (668)..(670): n is a, c, g, or t
  misc_feature (673)..(673): n is a, c, g, or t
  misc_feature (675)..(680): n is a, c, g, or t
  misc_feature (685)..(689): n is a, c, g, or t
ctctgatcgatgctgcagcccgccgaggttgctggtcgacgggccctacggcgccccggcgcaggacttcaggaactacgacgtgctgctcctcgtcggcctcgggatcggcgccacgcccttcatcagcatcctcagagacctcctcaacaacatcaagctggccgacgagctcatggtacgcgtaccaccgtctcgtctcgtctgcattgcagctgtagcgtgtgtccggtttctttactttctcgtcgtctgaacctttttttttccatttcaggacctggcaatggagaccggccgggccgaggacagcgccagcaacctgagcggcgcgtcgacggcgagcggcggcaacaagaggagggcgtaccgaacgacctgcgcccacttctactgggtcacgagggagcctgggtcgttcgagtggttcaagggggtcatgaacgaggtcgccgagatggacaagaaggtgacgacgctggcctctctgcctttttttttctttccgttcgtgcgcgctggtttcctgatggttttggcaccttgccggccagggggtcattgagctgcacaactacctgacaagnnngnnnnnnnnnngnnnnnnnnnnnnnnnnnnnagaggccagcgtcnnnnccttcttgtccatctcggcgnnctnnnnntnnnccncnnnnnnactcnnnnnaacca

SEQ ID NO: 6093 - DNA, 360 bp, Zea mays
cgcccgctccatattcaatctcgtcgtcgttccgcgcgtcagcaaaagatcctaagaatcgggtgaagacgaagctagcagcatggtattcaccaagtgcgtgataggaagctcgagccaggatttatcagcattcgtacgagatttgggtcgtgtttgatgctggtgagccgatttataatttttgtaagtttatctgatgattggattaactagaattattagtcgtaataatcctcgtatttagcgcaggcgcgttatggtagtgttaaaaataagtgaagaacgatgggtttagtaatgtgaaaggtagattaatttagggatatctaagcgaggtgacgacgtaaaggatagata

SEQ ID NO: 6094 - DNA, 1003 bp, Zea mays
agttagaacatacaccggtatattatctgcagtcaattagttttcaattactttttatcgtattaaactgttgcaacggttttccagtctcatgctacgctcctggagcaggtcaacgagaaagcatttgaacttgaggtacataaactctcctcagagcatgcattaaaaagatggatagtagtttacccttgtttatggtgaacctggaggtggagtcaaaggaatcagagtagagaatatagaatgaaagccccaaaatgcttcatgtttaattttctcattcttgtcaaccatataactaatcaagagcatttgaggtaacttaatttttcccttatgtgcatcatggttaataagttcccctagtctagcctagcctaggatccttgaccctcaagaggtggcaaagtattaatagatactccactacagtattgttttttcagtgtttgtgtgccattcttgttctgcctgtattttataaaggctcctttttttgtttattgcaggtgaagacagcagataacagaatattgcaagaccagctacaacaaaaggtaacagtttgattgtaagttaaattaaccaaaaagcacaatcttatatcattccacattgtcttgttttcagacgagagagtgtcaggcattagaagaaacagttgcccacttacacgaacagctttcccaagctcttgaagctaatgatttattgtcagaaagcatcatatttcagcagtacacagacaacaaccttcaaactggatcgcaaattcacaaagaaaatccagaatctatagatatctctgatgaactgcatcagaaggcagagcaggtttgccttttctctgcactaaggatcaaaatcatttcgatcaactacagagtttttgttgtagtagttattgtgctagatttgaggaatttgactaacattatctattctctcaccagtcagagattagactaacattatctatctctcaccagtcagagatgag

SEQ ID NO: 6095 - DNA, 392 bp, Zea mays
cggatgcagcgggaggaggggaaggtttctgacaagtctagttcagcgtgggcttctgaggcggtagctacaatggagatgacacactcgaagctcttccccttcttcatgactggtctccttccccaggaggccatgcaatacttggacctagtgtgccgatgcaccaagaacacgcgccatctggtctccatgctcagatctcttgcagagcgtctggaagatgcgaacccgtcaattatacacaacaacccaaccaaactgtatgagcacctccttgtaaagtccccataagcctcaaactgctctgcgcagcgatgcggtgctaacctttacttttcctgtcagtagtgcagcttatgtatttcgggttatttgaacgattgtgaaag

SEQ ID NO: 6096 - DNA, 919 bp, Zea mays
gttatccagaggcgagctacctgatgaagaaaacaaaaatggtactatattcatagcatctgagcatttagtgcataggcatacaacacgatgaatatgaattgagctttcaatataagatattgaaattttaggtgctgggttattgtataccagtaggcacatgaaacggagcagtcctaggctatgccagggccaacatatttttcatgctgtgaggtactgttcatggtgttcttaggattaaatttgttatttaaagataaggttagattgagttgattccttgattttagagaatggtctcttaaaagacaagttactcatccatgtgaggatggaattctggttaatcaataaatgacaaataagtggatctagactatctccttatctattcctgtccttgcggtgtagttgatgggaatcggcataagtgcactgcttggatgaagggccatcgaatttatgcccttgacatactatcttttatgttcagacacttcattaatttattaggtacctgatttgagatctcaagtaaaaaaatccatgatacctattgtttgatacttgcttgatacaagtttcggacaatattcatgacatggtgagatcagtgaacatcattgccaatagcccagtagtgatatcaatatatcactgaacttcttggcttcagcacattttcctctctttgtaatatattattgaacttctcgactttaacaccttgatttctcgtggcgatataatgtggccgctttggattttgtacaatgacgtgttgtgaccttttgattgacttgcacgatgtggtacatctgcagggaagttcatgaggaagtaactgaggcaaggcagaaggcctcaacggtaagatctcgacgacaagagcaggatgctgctcgtcgagaga

SEQ ID NO: 6097 - DNA, 393 bp, Zea mays
gttagcacaaagccgatacacactatcctgcagagcaactagttgtgcagaactgaagaaaacatatggcaatccggatgagaagaacataaatgtagaatacctgttctaacatctttcaagtcacaatagcaataaaaagagagatagaggaaggtcgaagttgacataaagcagtaagagatttgaaaggatgaaatataccaaagatttagcctatcgctttaaccttgacatatggtttttgttgggtttcaactctagcctacactaacttgccgttgaaacaaatatatctgacaaagctaaccaacaaaacagatgacagcagcatatagaacgcaaaaaaataacttcctgagtacatgtgaggaaaatgattgtcggagaaag

SEQ ID NO: 6098 - DNA, 401 bp, Zea mays
ggctgaaattcagggtcatcactgcaagcttaggggtgaagttagagtatgaagggcaccccaaatcatctaaacaggatgctgaggatctgtgatcggtgattgaaattacattttagtttctccgcccttgctgtttaaagctcttcaactcattggcatcatgaggaactgccgtgagacatcaatggtcagagtccgaccataaccacatatatagttttaacaatgtctcaagttttgtgttattatctgttgtctgttgtctgccatatgtaatagtttccttttagaaggcaaaagcacttccttcccattttctttgaagtacttgtattcctatagtccattcccgatttctttttcgccaattacaaagacaaagataccaagccgaagtg

SEQ ID NO: 6099 - DNA, 385 bp, Zea mays
ttaccgtcgtctttgcgattgtatttacagtatacgcaagacgagccctggacaacatggaacagtccgaagtcgcctgcgctgaacctgtcgtcggtgaccctgctggatcgaccgagtccagagatcaccttcagggatgttcgactgcacgttctgtaccaatcgatgttgtgtaatgacacaggtacagtacacgtctaaacgactggttgacttaaagttcctttgttgtacatacacaacacgatagatcggtagaagggagatcttaacaatgtgtgtaattgttaattgttacgtactactgtaagtctgtaaatatgttatgacctgatgctgtgttcagccacacgcatgttgtgtgattgttgttgcttcacag

SEQ ID NO: 6100 - DNA, 690 bp, Zea mays
aaggaatttcacctatctactgaagtgagttttattagcttgtttaaatggaccatgcaatcattttggatacctaacaagtttttaaatgctcggagcaactttttgttcatttgataatatttgatgaatttgacatcgtgacgctttcgtgctgtcaatctcttattcccggacatgtgaaacagtgagcaccgctccatcggtggctaccagtgcctgttcgctgtggatggattctccagagtaaaacttacgccccaaatccccccgctctctctggtatggtaactatagcccatcaaacagagtatgcggattcaggatcctgcaacagccatggtgccagcaaccattgtatcccgtattccgtcaagaatttactgtctccttgtttgcacgttttggtgcaggtgaaagaacccaaggtgtttgcacatgggaatacgagagaccctgacattctttcactgagttggcccggttgtccttgagggcatggggacaccggacacccagattcctgtggcaggaccactaactgccagcagtgaagatgtgtttgagtcagtccgcgtgacacatatatggtatacatctctgggtcttgccatgaagctaccttacctgcaaatctagaatggggcccctcctcccctagatcccacggcttcgaaaccacagctttaa

SEQ ID NO: 6101 - DNA, 401 bp, Zea mays
tggatttttcaaaactccaatctgatgagaagtgccacattcttcttgtgcaagctctcaggagtcaactaagagagtttggttctgtggtggctatagttgacgcgagctgcttagctggaataaggagacattggaacacccctgttccttcagaaatcactcaattagctagcagatgcttcaatcactatggtgctgaaaatgatgataaaattgaggtaccttcagcagacgacactgacaaaaaaagttggatatctgagaaacctgtggttgctgttggtgcaggagggacagcactcctgggcttttcatcattatcgaaatctcttcaggcttctgccttccttaagatggccccttacaaaagtccagcggttctgaagtatggattaatg

SEQ ID NO: 6102 - DNA, 474 bp, Zea mays
gagtgacagccagggatccactcatcccctgggtggaaaaattcaggttgtggattggattgctagctaccgaacaagccctcagcgtgctaatttcagtggaatcttggtagacaccactgaacttcttggttttcaattaaggtgcgcctacatttcatttccatattgtttattcttcaaataggtcaaaaaattctgattctccatgcctccctcctgttattctgagttctgaacagattctttttcgatatgcagttcgagcatagagatcgtcttctctcacactgagttgccagtttattccgaaggtccttcaagctaagttctgatgatggctaaggccaatggagcagtccatgcatccacgaaggaacccttgttttcttttggtgtcatagctgatgttcagtatgctgatatcccagatggtcgctcattcctcggtgtcccaagatactaccgccatag

SEQ ID NO: 6103 - DNA, 377 bp, Zea mays
cacctttatatacccgaacagttcaaatgcagcaatagtttgaaacgacaaatccgtaggctcagccaaaatcaaaatcattagatactataccctactataacatgtcatattatacagaaacagcaggaaggaattgtaacatccagtgatgatgttctttttgttgcactacggaagcttgccagatttgagagcctcaaagcgtgcagtgagagtttcatagtcaagaggcatatttggatgaacacgagaatgaaggtttgtcttcggcaattcagggaaatcttgatcaggctcttcgtcttctgagtgacgattttctgaaaacagctcactcttaggaggcaatggcctttccacagactgaatttcca

SEQ ID NO: 6104 - DNA, 1413 bp, Zea mays
  misc_feature (417)..(419): n is a, c, g, or t
  misc_feature (656)..(656): n is a, c, g, or t
  misc_feature (658)..(659): n is a, c, g, or t
  misc_feature (663)..(664): n is a, c, g, or t
  misc_feature (666)..(675): n is a, c, g, or t
  misc_feature (678)..(678): n is a, c, g, or t
  misc_feature (680)..(694): n is a, c, g, or t
  misc_feature (701)..(711): n is a, c, g, or t
  misc_feature (719)..(723): n is a, c, g, or t
  misc_feature (725)..(738): n is a, c, g, or t
  misc_feature (740)..(746): n is a, c, g, or t
  misc_feature (750)..(754): n is a, c, g, or t
  misc_feature (756)..(757): n is a, c, g, or t
  misc_feature (768)..(768): n is a, c, g, or t
  misc_feature (770)..(776): n is a, c, g, or t
  misc_feature (780)..(784): n is a, c, g, or t
  misc_feature (787)..(791): n is a, c, g, or t
  misc_feature (796)..(801): n is a, c, g, or t
  misc_feature (805)..(811): n is a, c, g, or t
  misc_feature (814)..(831): n is a, c, g, or t
  misc_feature (833)..(838): n is a, c, g, or t
  misc_feature (841)..(851): n is a, c, g, or t
  misc_feature (855)..(856): n is a, c, g, or t
  misc_feature (859)..(867): n is a, c, g, or t
  misc_feature (870)..(870): n is a, c, g, or t
  misc_feature (873)..(874): n is a, c, g, or t
  misc_feature (877)..(878): n is a, c, g, or t
  misc_feature (886)..(886): n is a, c, g, or t
  misc_feature (889)..(890): n is a, c, g, or t
  misc_feature (893)..(896): n is a, c, g, or t
  misc_feature (905)..(918): n is a, c, g, or t
  misc_feature (920)..(951): n is a, c, g, or t
  misc_feature (954)..(955): n is a, c, g, or t
  misc_feature (959)..(988): n is a, c, g, or t
  misc_feature (991)..(994): n is a, c, g, or t
  misc_feature (996)..(1006): n is a, c, g, or t
  misc_feature (1008)..(1011): n is a, c, g, or t
  misc_feature (1016)..(1033): n is a, c, g, or t
  misc_feature (1037)..(1055): n is a, c, g, or t
  misc_feature (1058)..(1063): n is a, c, g, or t
  misc_feature (1065)..(1072): n is a, c, g, or t
  misc_feature (1076)..(1089): n is a, c, g, or t
  misc_feature (1091)..(1096): n is a, c, g, or t
  misc_feature (1102)..(1107): n is a, c, g, or t
  misc_feature (1111)..(1126): n is a, c, g, or t
  misc_feature (1128)..(1134): n is a, c, g, or t
  misc_feature (1139)..(1139): n is a, c, g, or t
  misc_feature (1141)..(1144): n is a, c, g, or t
  misc_feature (1146)..(1155): n is a, c, g, or t
  misc_feature (1161)..(1162): n is a, c, g, or t
  misc_feature (1166)..(1168): n is a, c, g, or t
  misc_feature (1170)..(1181): n is a, c, g, or t
  misc_feature (1193)..(1193): n is a, c, g, or t
  misc_feature (1196)..(1200): n is a, c, g, or t
  misc_feature (1206)..(1216): n is a, c, g, or t
  misc_feature (1221)..(1221): n is a, c, g, or t
  misc_feature (1223)..(1225): n is a, c, g, or t
  misc_feature (1227)..(1227): n is a, c, g, or t
  misc_feature (1230)..(1236): n is a, c, g, or t
  misc_feature (1240)..(1240): n is a, c, g, or t
  misc_feature (1242)..(1242): n is a, c, g, or t
  misc_feature (1247)..(1257): n is a, c, g, or t
  misc_feature (1260)..(1265): n is a, c, g, or t
  misc_feature (1267)..(1268): n is a, c, g, or t
  misc_feature (1271)..(1273): n is a, c, g, or t
  misc_feature (1275)..(1278): n is a, c, g, or t
  misc_feature (1284)..(1284): n is a, c, g, or t
  misc_feature (1286)..(1288): n is a, c, g, or t
  misc_feature (1293)..(1301): n is a, c, g, or t
  misc_feature (1303)..(1306): n is a, c, g, or t
  misc_feature (1309)..(1324): n is a, c, g, or t
  misc_feature (1345)..(1350): n is a, c, g, or t
  misc_feature (1355)..(1375): n is a, c, g, or t
  misc_feature (1377)..(1382): n is a, c, g, or t
  misc_feature (1385)..(1395): n is a, c, g, or t
  misc_feature (1398)..(1408): n is a, c, g, or t
atgtaatgagtttaggaatactatttgtgcatatcaacattggaaagaaggaatggacattgaagtgtcccatgtaaaaagaaaagaaattcctttgtttgtttttcctggtggagtgcgtccttctcgttcttctagaacagcgcacaagaagagccgtactattccaacatgtgatgtttcagctgatgatcaggtgggaaacctattgggcgttgccagttgtagtgatgctcaacctgtaccatgtaaaggcagctatacgaaacagccagatccaaattgcgctggaggctttcagttgccaggaagtacttctgtgttgcctcctagcttacccaatgaagtagttttgaatgggtctgctaattttcatgaagaatctgttgagcgtgaacatccagaacactatcaggnnnatgaagtgttggacgcatgacatgcgcatcgcatcatccatcttgcattttgaagttatgtcatgatcttatggtccgaccgtaccggtacatttttagcatcgtacgttggccgaggaggggtacgatgcggcttcatatccttagaggtatgaaggcagaagtcatccttgcatttgcagacatttgcactcatgaggaatatatgaagtgtgacattactatgttactattgcngnntcanngnnnnnnnnnnggnannnnnnnnnnnnnnnagattannnnnnnnnnncttccccnnnnncnnnnnnnnnnnnnncnnnnnnntccnnnnngnntcgaggccctncnnnnnnnaccnnnnnccnnnnncaaannnnnnaagnnnnnnnagnnnnnnnnnnnnnnnnnngnnnnnnttnnnnnnnnnnnattnnccnnnnnnnnnccntcnncanncctccccnaanntcnnnntcatttgtnnnnnnnnnnnnnnannnnnnnnnnnnnnnnnnnnnnnnnnnnnnnnccnntctnnnnnnnnnnnnnnnnnnnnnnnnnnnnnnccnnnncnnnnnnnnnnncnnnntcaannnnnnnnnnnnnnnnnnagtnnnnnnnnnnnnnnnnnnnccnnnnnntnnnnnnnnatcnnnnnnnnnnnnnntnnnnnncaattnnnnnnctannnnnnnnnnnnnnnncnnnnnnntcttnannnncnnnnnnnnnntctctnntcannncnnnnnnnnnnnnccccctcttttnccnnnnncctccnnnnnnnnnnnccccntnnntntcnnnnnnnctcntnctgcnnnnnnnnnnnccnnnnnncnnatnnntnnnnttttcncnnntaccnnnnnnnnncnnnnctnnnnnnnnnnnnnnnntcaaacactacctttctcttnnnnnnatatnnnnnnnnnnnnnnnnnnnnnannnnnnaannnnnnnnnnnctnnnnnnnnnnnatcta

SEQ ID NO: 6105 - DNA, 498 bp, Zea mays
tgatggaagaagtttgagggtgaactctgggccgccaccacccagagatcggtcatcaccgtcaccgcaaagacccaggggtgatgccaacagggtctacgtgggtaacctttcctggggagttgacaattcagctctcgcaaacctgttcagtgagcaaggtgaggtactggaagcaaggatcatctatgacagggagagtggaaggtcaagggggtttggttttgtcacgtacggttctgccgaagaggttgagaatgcaatatctaatctcgatggcgctgtgagttctgaatcactctttttttccctagctgctcacgccacagccttcgaaagttgaagtctagtcgtctttcaggatgtactgaattggtttaccattaccctgcaggacttggacggcagacagatccgtgttacggtagcagagtcgaagccacctaggcagcaatactgaaattcctcttgagatttttgtaggtgtaccggtagccc

SEQ ID NO: 6106 - DNA, 367 bp, Zea mays
tcttctttatgcatgaaagttgttatatatgctcggtgcaggtgaacagtcatgcagcaggttggtatatgtttcacaaaaagaactagggttttcaaaccctctacataaatatttgaaaaaaacatgtagactgaagaaaacttagcaacctgtctattcaattctagttgctatgagaatatttacttgttagcagtaagcacttataatcttcgaaagattggtttctcagtctggtttttcttaacagtagtacagcacataaaatggaaaataaatatacttctacaaagcgctgaacaagaagaaataacaatgtgtcagcaagaaaatttgatgatacatacattctttcatgcacagg

SEQ ID NO: 6107 - DNA, 864 bp, Zea mays
gcatttcttcctctcagagaaggatattgggcaaaaccgtgctcatgcttgtgttccaaagctacaggagcttaacaatgctgtcatcatctctaccgtaactggtgatttgaccaaggaacaactttctaactttcaggtacatgagcatggaatgatctgtggtttgcttaagtgtttgttgtataaaaatgtgtttagactctaaattgaccaacaatcaatttaaatctatcagttcagtgacaaaaagtcatgcaaattcctattaacaacatattgaaagagaagtttacatcctagaacattgtgccatttgaaacatgtcttacaaaaatgggcatagggagtattccaaaggttctattaatgagtcagctgctaagtaaaaagccaccaaatggtttatctgcatctgttgacacatcatcatgttaatgcatttttgttgcatatattcttccatgctagcattgtgcgttaggttagctaattttaaatgcttaaactactttattttagcctgcacactccatagccagataattatggagctggtgctttcccagatagggcttcacttgaaaatatttttcttgttaagggggattagttgatttaatgtattgagcctttttgggatattttaatgtgtttcttgattagactgtaaagatttgattgccacatattctcgaactgataacttcctggtcaacttacaggctgtggtctttactgatatcagcatagaaaaagcagttgagtatgatgaatactgtcatagccaccagccgccaattgctttcattaagtccgaagtttgtggcctttttggcagtgttttctgtgactttggtcctg

SEQ ID NO: 6108 - DNA, 379 bp, Zea mays
ctattcaattttgaatagcccctccaattcccttcgttccgctccaaaacgaacatgcccttacacgtatcttacacatgtattcgtgctgtaaatttcgcatacaaaactacttccgtcaaggattctttcttacttacaattcctgacgctccgcagtgcatgcacaggctcacgagttatttacttgttactgctgacgaagcgattatacaagaaacatggaaaagatatcattttttaccttctcatgtctcgtgcccggcacacacaaaaacttggcaaaccaacaccaaccttcactcctccaagctcccagctcccaaagctgcaagtttcaccagaccaccgatggcctcgtcgtcggcctcagtcggtt

SEQ ID NO: 6109 - DNA, 723 bp, Zea mays
  misc_feature (705)..(707): n is a, c, g, or t
ccaccgttggcatcacggaccatgctcaggcgagtgaactagtagctggcgacattatatatatatatacttgcgatacagcttgcttgttctccgtcagctcagctcttctagttctacttctagctagctgacgcgaagtgacgagcgagtagttccaagaaaacattaaaagctagctagggacaaacatttcgttattattattatacaataataatgttgttacatgcagggccacctgggagaggtggtgttcgtggagctgccggaacccggcacgaaggtcgccgcgggaggatccttcggcaacgtggagagtgtcaaggccaccagcgacgtcaactccccgatctccggcgaggtcgtcgaggtcaatgccaaactgtcagagacgcccggcctggtactgctagctactgctgctgctagtttctgctagtttgctactactccatgcatactcctaatcctcgacaataacgcaataactaaactctcgacaataatgcaataactaaactcctaacgcgtgcagatcaacacgagcccgtacgaggacgggtggatgatcaaggtgaagccgagcagcccgggggaggcggacgccctgctggacgccgccaagtacaccaagcattgcgaggaggaagacgctcactagacccaggcccggcccagcccagcaagcgtggatgcttaccnnngacagcgcgcgttttg

SEQ ID NO: 6110 - DNA, 1502 bp, Zea mays
  misc_feature (476)..(486): n is a, c, g, or t
  misc_feature (488)..(491): n is a, c, g, or t
  misc_feature (497)..(499): n is a, c, g, or t
  misc_feature (502)..(505): n is a, c, g, or t
  misc_feature (507)..(507): n is a, c, g, or t
  misc_feature (509)..(532): n is a, c, g, or t
  misc_feature (535)..(540): n is a, c, g, or t
  misc_feature (542)..(556): n is a, c, g, or t
  misc_feature (558)..(564): n is a, c, g, or t
  misc_feature (566)..(584): n is a, c, g, or t
  misc_feature (586)..(589): n is a, c, g, or t
  misc_feature (592)..(592): n is a, c, g, or t
  misc_feature (595)..(600): n is a, c, g, or t
  misc_feature (605)..(605): n is a, c, g, or t
  misc_feature (607)..(609): n is a, c, g, or t
  misc_feature (611)..(617): n is a, c, g, or t
  misc_feature (619)..(627): n is a, c, g, or t
  misc_feature (638)..(638): n is a, c, g, or t
  misc_feature (640)..(640): n is a, c, g, or t
  misc_feature (642)..(642): n is a, c, g, or t
  misc_feature (647)..(650): n is a, c, g, or t
  misc_feature (652)..(655): n is a, c, g, or t
  misc_feature (657)..(657): n is a, c, g, or t
  misc_feature (660)..(660): n is a, c, g, or t
  misc_feature (662)..(667): n is a, c, g, or t
  misc_feature (675)..(684): n is a, c, g, or t
  misc_feature (692)..(692): n is a, c, g, or t
  misc_feature (697)..(722): n is a, c, g, or t
  misc_feature (725)..(733): n is a, c, g, or t
  misc_feature (738)..(744): n is a, c, g, or t
  misc_feature (749)..(752): n is a, c, g, or t
  misc_feature (755)..(759): n is a, c, g, or t
  misc_feature (761)..(761): n is a, c, g, or t
  misc_feature (763)..(780): n is a, c, g, or t
  misc_feature (788)..(794): n is a, c, g, or t
  misc_feature (797)..(807): n is a, c, g, or t
  misc_feature (810)..(810): n is a, c, g, or t
  misc_feature (813)..(838): n is a, c, g, or t
  misc_feature (840)..(840): n is a, c, g, or t
  misc_feature (842)..(842): n is a, c, g, or t
  misc_feature (844)..(849): n is a, c, g, or t
  misc_feature (854)..(857): n is a, c, g, or t
  misc_feature (862)..(876): n is a, c, g, or t
  misc_feature (878)..(882): n is a, c, g, or t
  misc_feature (884)..(903): n is a, c, g, or t
  misc_feature (905)..(905): n is a, c, g, or t
  misc_feature (907)..(909): n is a, c, g, or t
  misc_feature (911)..(920): n is a, c, g, or t
  misc_feature (922)..(930): n is a, c, g, or t
  misc_feature (938)..(939): n is a, c, g, or t
  misc_feature (941)..(950): n is a, c, g, or t
  misc_feature (955)..(959): n is a, c, g, or t
  misc_feature (961)..(976): n is a, c, g, or t
  misc_feature (986)..(988): n is a, c, g, or t
  misc_feature (997)..(999): n is a, c, g, or t
  misc_feature (1001)..(1003): n is a, c, g, or t
  misc_feature (1009)..(1016): n is a, c, g, or t
  misc_feature (1018)..(1021): n is a, c, g, or t
  misc_feature (1023)..(1027): n is a, c, g, or t
  misc_feature (1030)..(1033): n is a, c, g, or t
  misc_feature (1037)..(1051): n is a, c, g, or t
  misc_feature (1053)..(1065): n is a, c, g, or t
  misc_feature (1069)..(1074): n is a, c, g, or t
  misc_feature (1076)..(1077): n is a, c, g, or t
  misc_feature (1079)..(1090): n is a, c, g, or t
  misc_feature (1092)..(1110): n is a, c, g, or t
  misc_feature (1112)..(1114): n is a, c, g, or t
  misc_feature (1133)..(1134): n is a, c, g, or t
  misc_feature (1137)..(1158): n is a, c, g, or t
  misc_feature (1160)..(1163): n is a, c, g, or t
  misc_feature (1169)..(1169): n is a, c, g, or t
  misc_feature (1171)..(1174): n is a, c, g, or t
  misc_feature (1176)..(1177): n is a, c, g, or t
  misc_feature (1182)..(1182): n is a, c, g, or t
  misc_feature (1186)..(1197): n is a, c, g, or t
  misc_feature (1200)..(1208): n is a, c, g, or t
  misc_feature (1211)..(1213): n is a, c, g, or t
  misc_feature (1218)..(1225): n is a, c, g, or t
  misc_feature (1227)..(1229): n is a, c, g, or t
  misc_feature (1231)..(1232): n is a, c, g, or t
  misc_feature (1234)..(1245): n is a, c, g, or t
  misc_feature (1250)..(1254): n is a, c, g, or t
  misc_feature (1257)..(1284): n is a, c, g, or t
  misc_feature (1286)..(1290): n is a, c, g, or t
  misc_feature (1292)..(1293): n is a, c, g, or t
  misc_feature (1295)..(1297): n is a, c, g, or t
  misc_feature (1301)..(1316): n is a, c, g, or t
  misc_feature (1318)..(1318): n is a, c, g, or t
  misc_feature (1320)..(1332): n is a, c, g, or t
  misc_feature (1335)..(1342): n is a, c, g, or t
  misc_feature (1349)..(1362): n is a, c, g, or t
  misc_feature (1364)..(1368): n is a, c, g, or t
  misc_feature (1374)..(1385): n is a, c, g, or t
  misc_feature (1387)..(1394): n is a, c, g, or t
  misc_feature (1396)..(1399): n is a, c, g, or t
  misc_feature (1402)..(1409): n is a, c, g, or t
  misc_feature (1412)..(1415): n is a, c, g, or t
  misc_feature (1420)..(1440): n is a, c, g, or t
  misc_feature (1443)..(1445): n is a, c, g, or t
  misc_feature (1447)..(1452): n is a, c, g, or t
  misc_feature (1455)..(1461): n is a, c, g, or t
  misc_feature (1463)..(1467): n is a, c, g, or t
  misc_feature (1470)..(1472): n is a, c, g, or t
  misc_feature (1475)..(1483): n is a, c, g, or t
  misc_feature (1486)..(1495): n is a, c, g, or t
tgttcccttgcacaggccgatagaagctaaactaaagcaaatgtgtgcgctattcatctatacctgtgccccacctgttcaacatctgatccaccacaacaatcatagaggcatggccaaagcttccgtgaaagacctgacgaattcgcagtacttatctacgcccggacgccctttgcaagtcataggcaccccaagaaccatgcgttgcaccagttccatactgagaaccagaatcagtggcagcagttgcctgcaatagagaaacagcttcaaatgagaagggatgtgaggactagttctgcagatgataaagtacaggccagagggaatacttgattaatgccatatccagagttataagggtttgcagcataattggccttggggttcccatagcttccattataacctgcaggatagtcgctgcattatgagtagcacacatgccacataaacagagcagggattaccannnnnnnnnnncnnnntccctnnnatnnnngncnnnnnnnnnnnnnnnnnnnnnnnntcnnnnnncnnnnnnnnnnnnnnngnnnnnnncnnnnnnnnnnnnnnnnnnncnnnnagntgnnnnnnatganannntnnnnnnntnnnnnnnnnttggtccttcntntncctcnnnncnnnnanctnannnnnncacccccnnnnnnnnnnccccctcnccgcnnnnnnnnnnnnnnnnnnnnnnnnnnaannnnnnnnnccccnnnnnnnctctnnnnacnnnnnanannnnnnnnnnnnnnnnnnccccaaannnnnnncannnnnnnnnnnacnccnnnnnnnnnnnnnnnnnnnnnnnnnncngncnnnnnnctccnnnnccacnnnnnnnnnnnnnnnannnnntnnnnnnnnnnnnnnnnnnnncncnnnannnnnnnnnngnnnnnnnnnctcacacnnannnnnnnnnnttacnnnnnannnnnnnnnnnnnnnnctcctctcannnaacacacannnannngaaatnnnnnnnnannnncnnnnnccnnnnaccnnnnnnnnnnnnnnnannnnnnnnnnnnnactnnnnnncnncnnnnnnnnnnnncnnnnnnnnnnnnnnnnnnnannnaaccacctcacctcccccnnctnnnnnnnnnnnnnnnnnnnnnncnnnngcaccncnnnntnntcccntgcnnnnnnnnnnnnccnnnnnnnnnccnnnacctnnnnnnnntnnnanncnnnnnnnnnnnnactcnnnnnacnnnnnnnnnnnnnnnnnnnnnnnnnnnncnnnnnannannnaatnnnnnnnnnnnnnnnngncnnnnnnnnnnnnnatnnnnnnnnataatcnnnnnnnnnnnnnncnnnnnaaaccnnnnnnnnnnnnannnnnnnnannnncannnnnnnnctnnnntatcnnnnnnnnnnnnnnnnnnnnncgnnncnnnnnntcnnnnnnntnnnnngcnnntcnnnnnnnnnacnnnnnnnnnncaacctg

SEQ ID NO: 6111 - DNA, 390 bp, Zea mays
cagtttttttcatatctgctgaatagagtggtattttgcttgtcttaggcatggactggaattatgtcctaatggaacaattgcatcggttagatctggaagactttaatggctcctaacattccatcatttcgttttttagctacattttgtctccaatacggcaatacccatgatttgctagctacataatatttttaatttttctaatcattagataataagttcatagtacatgaatactgcaatcagtccccgatccttgtggcatctatgtcaaacactcaactactcaaaacatacattggacaaatgcgtgctcatataatttccttgtgctgaatgttgtgcaggaagactacaacaactggaattactggaaggtgccat

SEQ ID NO: 6112 - DNA, 567 bp, Zea mays
gatctggaccggggagaccagtaaaggcagctcaacagagaccatttggtgacatgaaacctaaacaaactcgagagcatgttgctatcgagagaaagcctatggcaagccagacagatgtaagtacacgcaactaaggcacatgtttttgacgatggttaagacctcatgactcacattatctgttctccttgctgtagaaatcaaggcccggcgctcgaccttcggcaggagccaagctagagttggcaaagccaaaggtttacgatgatggtctggataacaacaggaagctggaagcagcgaagcggaggctccaggagcggtaccaggaagcggagaatggttcgtggtctctattttaacactcaaccagagtattatccttatctgtctgtcactagtagtaggtctctaccgtttcggttcggtttttattgaaccgttccacgcctctgtctgtgcagcgaaaaggcaacgcacgattcaggtaatggagctgggtgacataccgaagcccaagaatcaaaacagacaaccggtggtgaagtccaggaatagccttag

SEQ ID NO: 6113 - DNA, 815 bp, Zea mays
  misc_feature (770)..(771): n is a, c, g, or t
acctagttaactaataggctactgtgctgaagatgatgagaggggagtacaacgccttctagtgtatgaatatatgcctaatggaagtgtggatgatcacttatcaagtaggtcaactactctgtcatggccaatgagactaaaagtagctcttgattctgctcggggactgaagtatctgcatgaagaaatggaattccaggtaactcattagcttcatgatcaccgagaccatcacacttgtacgacttgaaaacatctgtggggcaatagcatccctctgcatctgtacctcacacgacaaataaatggaatatcaaagtatcaaacgctgcactatgctttagttgttctatatctcccctctaaatttaaggtatgcatgcaggttattttccgagacctgaaaacatccaacattctgctggatgaaaactggaatgctaagttgtcagactttggtttggctaggcatgggccaacagaaggtctcacccatgtctccaccgcggtatgcacaattacaagccgactgttagtttattacattagtgtgtttagattgaatagtgttttgtatccttttggaaagtagatactagtatcctgacagtattcaagtgatgaaaggcatattacttgaacaaaaagagaattacggtgaagaaaaaataaacaattagtaagctcttttagctgtacttctataacattattgactttttatgccattgaatttggatactgagttgcttggcctccagaaacannattatttttgtttactacttgcacaagtaacctcttaatgcata

SEQ ID NO: 6114 - DNA, 387 bp, Zea mays
  misc_feature (378)..(378): n is a, c, g, or t
gggcggaggatgtgtaggcgaggtttgctagtcgactagataatgccatacatatgcgtgtctctgcaatggcgcaattccaagcgcgctcttcgttgctccatcgatcgcgcagtgtctgcccggaagacgttctcgattcatacataagaacaacggcagcaatttcaatcaagcgcatcagcacccaaaaacttgtttagcgaagtactgtatgcaggatttgatagctatgtagaattgtgcaggcggtgtgtgctactacgggattgcgatttcaagttcactagagcttgggcatgtgggcaaaacgttgcgaggccgaaatgtcgtccatgtttcttcgccggttacttgggtgtataatgcaactgcccncacatattg

SEQ ID NO: 6115 - DNA, 527 bp, Zea mays
gaaaccttttgctggatcatctcacgccaagggcatcgttctggagaagatgtatgtcagatatgggaatgatctgtgcttttgttatgttgtacttcatgttcttgggctaaggtgtgtttgcttccattgtgtagtggtattgaggccaagcagccaaattcggccatccgtaagtgtgcccgtgttcagctggtgaagaatggaaagaagattgctgcctttgtgccgaatgatggttgcctaaactacatcgaggagaatgtatgtctgttgaccaattcaccttgtaatgattgtcaagatctatgtaatgaaaaagctaaccatctctcttgctgtaggatgaggtgttgattgctggatttggtcgtaagggtcatgctgtgggagacattcctggtgtcaggttcaaggttgttaaggtgtctggtgtgtcgctgcttgcactcttcaaggagaagaaggagaagccaaggtcttagatcactttcggtagtcaagaatggtgtaaactgcccaaggct

SEQ ID NO: 6116 - DNA, 350 bp, Zea mays
tgaagaaggtacacggccctgattttgctgtgcaacagagaacttgatcagtgttgctacatgttctatagtaaatctgtaagttatctgcttattctgacgtcttcttgtagaaccaagttgctcctgctggtgacatgagcagttgcaactcgcaaggcggcgttgtgtgggagtccttttggcatgcaagtgttttgctagttttgacaaggcactcctgtttcttcagtgttcgccgtctcggcggccgaagtgcccaagaaaaaaatgtatttactatttgatctactcctatgtaagttcagtggttcatgtagccaagtagcttggatatctatgaaggtact

SEQ ID NO: 6117 - DNA, 416 bp, Zea mays
ttttttcttctctctccacctgcagtccattgaggacaacatctgaaactatgtgccctgttagttagcaaaaccgttagcatttctttgcactatcacatctcttcatttgacaataagaaggtcgagttgttttgctctgatgagaacttattgtgttcggggatgcttgggagatgttttggaagaagcttattgccttgtgaaacgttctaattgacctgctgataatgggcccagctagctatgctctgctattcttatgtaagatgtgaattgagctattcaactgctagtgtttttacatattccttgccccttttcatatggatcatccagaccctgccaatgctcctcgccttgctctgttagggcatgttcggtttgatctggagtgagggagattagagggataa

SEQ ID NO: 6118 - DNA, 605 bp, Zea mays
gagtcatcctgatcgtgtcccaacgcatctgaaatcgcaggctgagtcaaaattcaaggaggtaaggtaaagttttagataatctgcgagcagatatgaaaatgaacccatattttcttttcaagatcgtatatttgtttgtttttcttacacatagatagatgcaaaccattcccgaattgtgtgacgtctgaattggatcgattgcgcaaagtatcgtaacataattcctgagtcctgagcttactctttcctccaccgccattacaaaaccgtctgcttttgcaccttgcagatagcagaagcatattcttgtttgaaggacggtacgttgttaaccactcagataattcgtattttgcttcggcaaaaaaaagaactactgcaagcagtaaggtattctctgacgtgtgctgtgcactgatgagtcgtatctcgtccatcgtttgcaggaagaagatcagggagtaggatggaaggtgaactagattccatgatggacatgattcacacaatctttgtttgtagttgtagctaattacatgtatcatcgttcacgcagttcatgttatgcgttctggtgttccaactagccacggaagatc

SEQ ID NO: 6119 - DNA, 376 bp, Zea mays
ctctccagccaagtggaaggcatggctgcctctggccgagctgtggtacaactcttcgtatcactcatccttgcaatgctccccattcaaggcattgtatggatatgaaccgaaattaccttcttttcctgtgctggctgatgtttccactactgatcttccctcactgatcaaggaaagggatcttcatctggaattattgaaacacaacttgctggctgcacaaactcgtatcaaacttcaagctgataagaagcgtattgatcggcagtttgcagaaggggagatggtacttctgaaactgcaaccttacacccaatcctctgtggccagtcgaccctttcctaaattggccttcaaatactttggtccttaa

SEQ ID NO: 6120 - DNA, 340 bp, Zea mays
gagttctggttcatgggttttctaatgtacgacaaggctgcaaccagtcttcaagaagccttggctagcgcacgtgagttgcaaccgtgaagacaccggggtaaatggtgtttcttccggttacatacatcagtttccacatcttgagttcaggctgggtcgcaaggattccttagctttctgagtgtctcctgtttcagatccttttagctgaagcctttgacacggtacactcactagcttgcatacgcgtcagaaatgtctgttgttcctgtcaatgttgtaatcatgagatgtatgtggagaaagaatgcatgtcaaacatttaaatgtggcagaa

SEQ ID NO: 6121 - DNA, 481 bp, Zea mays
cctctccggtggcaccaccatgttccctgggatcgctgacaggatgagcaaggagatcactgccttggctcccagcagcatgaagatcaaggtggtcgctcctccagagaggaagtacagtgtctggatcggaggatccatcctggcatccctcagcaccttccagcaggtaaacaaacaaacaaacaaacaaatttcgcatttcctcaatcaaggtcgatctatctatctatctgcctgctcacgattttgcttgcgactgcagatgtggatcgccaaggccgagtacgacgagtccggcccatccatcgtccacaggaaatgcttctaattctttgggcccgagaaatgcaagccgtgggggagccgttaccgccgccagcctctcctgcccccgttttcgttgccgtttcttcattagcgcgaacaaagttttgtgccggtctatcggccgccgctttcctcccctattcatcaagac

SEQ ID NO: 6122 - DNA, 496 bp, Zea mays
tacacccgtcttacgtgagcagtctaaacccgtccgtcgtcggcgcaggagaactctggttctgaacccatttcccccctgaatgtttgggcgcaggtgacgctgccgttcttcgtcctgcacggcgaggccgacacggtgacggacccggaggtgagccgcgcgctgtacgagcgttcggccagcgccgacaagaccatcaagctgtacccggggatgtggcacggcctcaccgccggggagcccgacgagaacgtggaggccatcttctccgacatcgtgtcctggctcaaccaccgcagccggagctgggccgtggaggaccgccttcttatgaccaggaagctggcgccagctccggccaagtccatcgaaggccacggcaccgtggacggcaaagtgcacacacaacaagggcgccctcggcggcgccagggcttcctctgcgggcttgccggccggacgcatcaccacgcggagatgtgaaagatagaat

SEQ ID NO: 6123 - DNA, 494 bp, Zea mays
acagaagaagagagcacaacgcatgcaatgactgacaggctgttttgtgacattttaggtcgctgcaaaaggtgggtaccaagcctgctgcgatgatcaacagcatgtcgtccacataataatctagataatcaaggttatagtaacaccaaagttgccagggcttgtcaagcacacaacatctcctgtacaaaatctgcatgcagagtacgagcctcgtatatccatgcaagatgatatgtagcttcccagcctgataagagtcagctagtcctaccgcaaggcagataacctacagggctgagagataagagaaacatgttagtagcagtgtgcattgtaacctccctactacacccatgacaaggcagtgataatttgatctagaagcaagcaaaaatatttgatgcagcggtaatacctactgattgtcgtatccatccacttcaatctacttctgcaagcatgtgcccacaacctgtgaaatatgatct

SEQ ID NO: 6124 - DNA, 471 bp, Zea mays
acgtacacatataactgagtaaactctgatagtggcgggcgcatttggttgtctccatctgatcagcaagcagagccgacagagcacctgagaacgccggcatccttggtcagcgacttcacttggttggagctggctgccgcgaaggcctggtgcttgttgtaattcggccgcaccctgctacccgtctgcttgaagacagcgccgttcaggaaggagtccccgatggaggcccagtcccattccctccccgcgaccggcatccttctcgtcacctgatcaagagaaacagattacgacgtagtacatacagaagctgcagacgacaagaagactgaatgactgataaaagctgaaactgtgagagaccttcttgttatctgctgcggcggaggccacgaacaggttgccctggctcttgacgcttggtcccatgcttcctccaatggcgtagtctttccatcccaagta

SEQ ID NO: 6125 - DNA, 907 bp, Zea mays
gatttggatgtaacaagttcagttcatgcgctgatgctgcaattgttggtctgatgccacctcccttgttagaacttcaggtgacttactgactatcattcttctattgttggtagatataactgttgcataaacttattattatgcctttgccatttggttttatcatatcctgattctcttaaaagctacctttagtggaagttttctgaagccacgattatattgaattcagctgcttttatattgctgggcagtcaagtcagcgccactactgtgccatcacagttggagaggatgctgtagtttcagcatataggtgagtttcactacctgcaatgggttttgcatttctgacatccattatgagttctatggttatggtgtgtccaagacagaatagtgcctgtattattcatgtgcaaatgtactttgtgtattatgtttcccactttaaattatgttgcaagtttgcaacagaaaactagctatgatattgatagtttccattcaaatttgaattgcaatcagttcatactattgtttctctagaagttggcattgggaagttagcagataatgttgccatattgttagttttacacatcttctaacttcttgttattctgtaggttatcagaagatagaaccaggtcaattgttggagcaattttgtcaagaggtgtagctgcaacattttcgacaatatcatctttgtccaaaatactatggcggagtgagccgtcaccacctaaaaagtcacggccaaagccccaatcctttgcaaaaagtaatggatgtagttaagattcagtattattaaaaaaatataccaaaatttattcctgactgttacataaactgcagcatcacccctcacctgcttgaaagactccccaaggaaagg

SEQ ID NO: 6126 - DNA, 379 bp, Zea mays
ctgtacgacgcagtgaagtacaccacggccaacatgatgctgatccaggtcccagtgttaggaacaacgaaggaattctggcgattatctgacaaagcgactaggatcagcagaaaacttgcattgatactgaggagccaccactcagtcggcaagtacctagctgctcctctgcaggtgtccaacatctggattgggaacaatgggagtgtcaagctaaggggggtcggtttcactggtaaaggcttcagcactgagcgtgtgagagatgactacaaacgcatgtccaggatcctgatggcgttaattactctctcgggtggggacagaaccaaattgcctccggactacaaagagttcctcctgctcttggaataaa

SEQ ID NO: 6127 - DNA, 770 bp, Zea mays
actgatggagtcgcagaaggtaataatcctttcaacatcgaacctaataatttaatgtagtactggtggttgagctgaaactattaagtttcttttgagtttacttgcaggttgactacgattttgagtactacaagctggaaatggcagctgatgtgcagctactcactctctctgaggggaaatcaaacatccttccttcagatttggtagtgcctttccggccatcctctgttcccacagttaatgcaggtgctgaggaaactgagagctggaggtggtttttgaccacagtaaggtctcttcctcagtccactgaacctgaaacttaccaggtaaacaccccttactccattctctatctaccaatggcactgatccaaaaccttgatataatttcactgttcttaaagccttagaatatgattgcaaaagatgcatattttaatatccaactataccacttcgcatgacatggttaatgagtagtgtaacgtttgcacttattgcagatgattcaggatgaaatggtcagtgccatgcgtgatgataggagcttgggttgttctgaacttagcaggtctgtattagtgccacagttgaaaacactagccttgctgtttctgtttggccacgaagtctgaatcgtttttgagctcacttcccttcctctgatctgcagatggctaacaatggcacaaataatggcctccagctttggcgagaagagtctttctttggagcactggcagatggtgaaggagcttgag

SEQ ID NO: 6128 - DNA, 798 bp, Zea mays
  misc_feature (639)..(640): n is a, c, g, or t
  misc_feature (652)..(652): n is a, c, g, or t
  misc_feature (656)..(686): n is a, c, g, or t
  misc_feature (688)..(694): n is a, c, g, or t
  misc_feature (698)..(700): n is a, c, g, or t
  misc_feature (702)..(713): n is a, c, g, or t
  misc_feature (720)..(722): n is a, c, g, or t
  misc_feature (731)..(738): n is a, c, g, or t
  misc_feature (740)..(740): n is a, c, g, or t
  misc_feature (742)..(751): n is a, c, g, or t
  misc_feature (754)..(759): n is a, c, g, or t
  misc_feature (762)..(776): n is a, c, g, or t
  misc_feature (779)..(795): n is a, c, g, or t
ttattcacagctttcatctgtatttgctgtgttgttattggaaacttggatttgattacccccactatcacaatgtttttccttctgtgctatgctggcgtgaacctgtcatgctttctgcttgacctccttgatgctcctagttggcgccctagatggaaatttcaccattggagcctttcacttgttggggcattactctgtgttggtatggttcttaatactcttaccattttattttgtctatcatgatcttcagcatgaacagtttaaacttgagttaggtctttggtttgagactttgttcacttctattgtttttaatccaaccaccttatcttcacctacaatactcaattattatttatcatgttttacaatagcaaatatctaactgaaacagccatgaaagcatttataattataagtgttgacatgaatctttgtatcaatttcagtgattatgtttctgatctcctggtctttcactgttgtctcccttgcccttgcaagcctcatctattactatgtgagcataaaagggaaggctggagactggggagatgggttcaagagtgcatactttcaattggcactccgaagtctcagatcactcggaggtgcgactgactatctgcnntgcgaataaaanaaannnnnnnnnnnnnnnnnnnnnnnnnnnnnnnannnnnnncccnnncnnnnnnnnnnnnccccccnnncccccctcnnnnnnnntntnnnnnnnnnncannnnnncannnnnnnnnnnnnnnacnnnnnnnnnnnnnnnnnctc

SEQ ID NO: 6129 - DNA, 603 bp, Zea mays
tacattacacagggcaaaaaaaagtttcaccaacgtacagtttacagggtactccatctaaatattggccacgctaactactccctccgtttctttttagttgtcactggatagttcaattttacactatccagcgacaactaaaacaaaacggagggagtagttatcagtcgaaatgttgtcgaagagccatctcggtttcgctcttccaggacgcatgcgacgattggcccctcatcctcttgatcttctccttgtctttgacagtggaacccttcttcttttcgggctcttttgtcagcgccggtctatcaccacattgagggcaaaccatacccttgccatgtgagtaggtctttggtacaccacattggagacacatcctaaacaatgagccgaagtcacaattaagaacactaatagtattaaggaattctggtatatattagagttcacgtaaaacatgtacacaagctatttcaaaatatttgtttcgttgtgacatggatacaaaaatgaccaataatacctcagaagatcagctgcatcttctggaccaggatttgcggcacctattattctttttccatcaacagaaccaga

SEQ ID NO: 6130 - DNA, 1259 bp, Zea mays
  misc_feature (1247)..(1247): n is a, c, g, or t
  misc_feature (1249)..(1251): n is a, c, g, or t
  misc_feature (1254)..(1256): n is a, c, g, or t
caaggggttggtctcttctttttcatatttgatttgtgtgctgcatctgtagccaaggcctgggctccatgtgttccagccctgtctcttggtctacaagtccatggaaggccacttaactatatgtagaaacatcatggtcataagggattttaggcatatttgaacaggctcggcctgggtctcaggtcatttctggcatcatccctgtgcattaaccatgattatcttgtattccagtgaattatttttgaatcagagaaaaagaaccatcaaccttatgaattttgtttctgtgctacaggtacatttgctcatgtggcgaagagtcaaaatctgttgtctccttatttaatgattatttgaagggctgggtatgttccatacagggctggcataacattcattttgtacatatattgggtaaatctctattatacctatgcatatttacagaacaagattcaaccagggttgccaaaaccacgcttgtttactgtgggtcgtcttgatgttgccacggctggtctgataatagtcacaaatgatggtaagttgatcatatgtagtaatatgtactctctcagttatagattgtaagtcattttggcttttctagatacgtaactttttactcagatatacattatgtctagaacacagtaaaaggctaaaaattatgcaactagaaaagccagagcgacttacaatttcgaacagagggagtactttggaaaaagaacagtttttgtcatccaagacctaagcttgattttctcctctcttttaggtgagtttgctcaaaagcttgcacatccttcttcaaatgtaacaaaagagtaagtttaacgtcttttgcgtgtttatatgccatttgaatactgtgatgtaatgcaaaagtaacgtgtactggaactactgcgaatgctattcattatgcaaaatccggtagcacaaattagtaaataaagtcttctaccatataatatgagaactatgaaagaagaccattagaataggtgtataggatcaatattacaactcttctctgtggatggatttacaattatagatcagtttttaaatggttgctgggcaatgaataggaaaagtgaacataaatttgatctgacaggtttgtgttttttcaatgctgcagatatgtggtgactattgatggtgccgtgcacaaaaaacatctcatagctatcagtgaaggcacaaaaattgatggggtcatgtgcatncnnngannnagt

SEQ ID NO: 6131 - DNA, 355 bp, Zea mays
ttttcagtggagatgacttccacagctttgatatggcggactctttcttcttggactgttccatgtccgtcaggtacacactgctcaagtcatcacacagtttgttggcctgctcaccctcagaatcatttccactggtccacgaaattctgtcaaagatcttgttgactgaatgttcactttcatacggcgaatggcttgagccttgcatctcttcatggctcatggtctcccagctgcttccatcttccttatcgctctcatcagaatggcttccatctgggaacaatctggctcgattttccagaaatatatcagctgttgggctagcttcttggatttcttgctttaggca

SEQ ID NO: 6132 - DNA, 408 bp, Zea mays
gctgcccgtcttgggagtcggagctcgtcacttgtgttgagctcggcaacgatgactcaggatgggtactgtgtgtgtgggttgctgttgtctgggttgtttgtgcgccctgtattggttttgggcccggtttcccttaaaactgggtcaattcttttcttcttaattgagaggcagagttcctgccattacgttcaaaaataataatagagtgttggttttgtggtgcaccatgtggggtagtacttcaataagctacacactaggttcaaacttgaaaaagaaggctttgagaatttggattaagagcatggagtgttaaatggatatgttttctatatgataggatctggtatctccagggatcgattctccttccaaacctaagaattgtcctgagacctggga

SEQ ID NO: 6133 - DNA, 444 bp, Zea mays
aatgaatacaaggataggcatgtagagatggcagaatccatggagcctgatcaacttactgaagcaatacatgccgaaagtcagcacaacttgggagatgctagggaggctttaccagcggaggagggtacaagcgatatgagtactagcgaagcagagagtcacaacaacattggtgcagcatccgataaggtctccgatagcagtgccaagaatactgcgcaggcagtggtgttggaggtttctagtgaaagagaagaggaaagtgaacagcagtgaagaccagtggattgactgctgaaaggaatcaatagaattccaccatatatgaatttgagacaaaaatgctccctggtttgaagtttgaaggagctatagcaagcattgatggagcgctattgctgagtttcacgggcttgccactgtgcatatacttcacaaaaa

SEQ ID NO: 6134 - DNA, 416 bp, Zea mays
cgtgcttctgctgcggtgtggtgtgcggatgctagctagccgactagccgagcacgagcagtagtgctggttgcggcgtaacttcgcttctatggttcggtagtgggtggtgctgatgtggtgcctgcttgcgtgagcgctgcctgcaggtccgcaaatgcaggctgctggcctgcagcactgcacagggcgtgcgtgagcacggagcagagggggagcaagggggaagggaaagccaaggtcaaggtgcgagcgacgggagttaccggcatgcccatggcgacaccgtctcggtcgcgcagtggagcaagggtggtttggggatttggggaggcgtaggcgttgcagttgcagcgtgatgaagtggggccgcggagaagacagcgggcgcagcttgatttggattttgagtgttg

SEQ ID NO: 6135 - DNA, 361 bp, Zea mays
tgtttctagtgctgttactcatgaccccccatcatcggagcaagatgagctgttccatcgtggccaagagaaggtcttatttgtggatgatgcttcaactgcagtgcctaatgaaaatcacgaggctggaaacgaggatgaagtgcgcagggctagggaaaggagcttcagaggtgatgatgtgtcaagctctgtagatcatgacggcaaggtgacaaaacctctcccagaggaacaattgaacatcatggataggatatttgaaggcaccacaaacttatctaatggaatttcatttcgagctcctggaataaatggatcatataccaccgcaggcaatgtggctacaccaacgaattct

SEQ ID NO: 6136 - DNA, 997 bp, Zea mays
gattttccgtggctatgtcacctgcaaaagcgaaaccattctatgcttctctagttgagaaatttcaaaggtcatactcggctgattcagtgaaaggtaacaaatatgtattttataattaattcgttgcgctttacacagtttgccaacctgaattcttgaataccaaatcaatgttctctttccttttgttaacatggatatgcctatattttggattttcctgttattattgatacattcattgtaacgttcccacgccgcccatggtcctgtgttgaacattcttttctgctggatgtacatttcatcttctcaatagtcacttcctgttatgatatgccgataacatagctatttctttagtgatgttttccagatgttctgctcacttgtttacttcgctgaactattggcctattgccatagtatgtctatgctccccatactcataatacatgatcttcttgcacttgttatttctctgctgctactattgcttttgctgttttgcactatgttccatctacatctaaagatttctgccatgagtcactgtatcacatgaaaatatatgtgatgatgttcctactttgactggcagatggtgtttttggagcgatgatgaaggtgcctctgactgaaacatgttatttgtcctcatagcgtttgattgaccttctcagaaaaaaaggtgtaaattggaaagccttgcaggtttctttggtgaatgatggccccgtgacaatgcaaatcgactcaccctcactgcaaggtgctgctcagtcaaggtgagttcgttcaaattaccaggtttattttaatctttattgaaccatacacttgctagctagaatagcatgcaaggttatacagacttgtctgaactattcatttttatgcatttgaacagcaatggttatgatgatttggttgcggatggtgaagcaagagtagctaaagagacgtgttaaaattctgggtctcttgctgacct

SEQ ID NO: 6137 - DNA, 596 bp, Zea mays
gattcccgtgctcaaggacatcttgaaagtggtaaggattgttatatagatactctttcatgttgttattgtagccggtaaaaattatctgctagactggcactatgcttaggtatcctctagtttgtgcctctagtttgtgcctgacaactcctctactacagtaggaacaccattgcaagatatcagaatgcatcatttcttgtgatctgctgattcattaatgttcattaggtccatgaagcccttcccgggagctattttaacagcttgctcctgaacagatacaagacaggttcagactacgtttcatggcatgcagacgatgagcccctctacgggccgactccagagatagcatctgttacctttgggtgtgaacgtgacttcttacttcggaagaagcctaccaaatcgcaaggtgcggtcgtagtgttttgttatcgtagcacatcatttagccggaattgattcgctgtaaacatctgccagccacttctggatctggagaagctggtcgaaagcggctcaaggtcgatgcacctcagaagccacatcattttcttctgaagcatggctcgctgcttgtgatgaga

SEQ ID NO: 6138 - DNA, 475 bp, Zea mays
gcagaagaggatgaaaggtactaagcaattactgtctgccattatcgttggtgttatattttctctggcattcacgtaacacttaaggtccatggtgcgcatgtagatttgtcaaagagtggaagaagtatcttgaggaggaggcgaggatcatgaaagatgttccagggtggaaggtcggcgagagcgtgtacaactccgggaaatggatgcccccggctactggtgagctccgccctgaggtttggtaagggcctgttgcaggcactgaatgccatcatgtcacgggggcacggataaggcttcatttttcattaaggatcagctgtttaaagacctgtatttgttgtacttgaaatctggctggttaataattggacatgtaaagacgacgtttacattgatgtaacgtgttcttgtctgctattgcttcccagcctctggtgtttcttcctgtaagtcattccgaacatga

SEQ ID NO: 6139 - DNA, 480 bp, Zea mays
tgcctttctcccaacccgccaaaccctacttgccaccgccaaacttccgccttcgtccgcgccggcgccgctctatcgctctaaaataacctttccagttccaccgggactagctgaaaggagagggaacggagggggatggcgtcgccggacgacgagataagccggctcttccgcatccgccgcacggtgtatgagatgctgcgcgaccgcggatacggtgtccgcgacgaacaaatcaagctcgaaaggcacaagttcatcgaacgctacggcaaccccgtccgccgtgacgagctcaccttcaacgccacaaagttgaacggcccatcggaccaggtctcatcctgatcccctgctccctcttacgccgccgccgccgcctcggcgtaaccctagccgtgcgttacccctgcagatctacgtgttctttcctaatgaggcaaagcccggggtgaagacaatcaggaactacgtagt

SEQ ID NO: 6140 - DNA, 846 bp, Zea mays
  misc_feature (791)..(791): n is a, c, g, or t
cgagcagttcgctcttcgcggattgggtgaggcgttgcagcatgaggtcatcgcggacaacattcatgtctcgttgatattccctcctgacactgagactccaggattggaagagggtatgtgttgcttatgaactggccaagtatattttagttcatgtctgctttggtagcaactaaacaagtgaaccatgaatgtttgagttatctatcctcttcgatttgacagccaagcttttcaacttggcaaaactgaaaatatcagagctatcttctatactcacttcagcaactgatctcagcaatcagtaacccttacaacttgcctgtaaatcagtacgccgtacattaaaatccatacaccaaaaacatgctgctactgaatatttcacattcccatttgttccattcagtgcatggctcatatagcatgctctcatttgtttcattagtacatgtttcacagtaccattttctcaagcacaccagcaaacattggggggggaagagtaggaaaaaaagaatgcccctaagcttggcatcctaatttctgaagacacggtctacaaatttttgctaccgaatgctgagcatgtggtttgcctaatttcagagcataagaggaggccggaattgacaaacatcatagcaggatcatccggtggaatgaaggccgacgatgttgccaagaaggctctggacggcatcaaatccgcaaaattcattgtcccctgtaatttcgagggcgcaatgttagccgtagccaccgctggtttatccccgcagagctcnccgttaatggcattcctagaagtggttggcgctggactcatgcggttgcggcaat

SEQ ID NO: 6141 - DNA, 371 bp, Zea mays
cgtggttcttatgtgattttgttacctcaatacggaggaatgcagtatgattttgcaggttgttttatctggtattttgggattcatgccttacacctattgttggatgaattttgctgcagatgtcacagcctcaatacaatcagctatttgtcaagaagcctgatctagataacccctggccttagggagtacagaactacatatgtgtataagttgtagcctactagcctggtcttttctttgagttgtgttgcaagtactctttgaagccctgttatcaggagcatgttttatgattagttagaggattctcttcggtgacgatgaatatatttagctagtcattttaatattggtatgtgtgatac

SEQ ID NO: 6142 - DNA, 356 bp, Zea mays
tgtgcacgtctctgtgtccgtccgtcgccggatctggtcgtagtggagacgtagtcgtagtgtctgatcaggcagcaacagcagcgacgcgtcgatagatactagttgacgatagggttgttgtggcaggggcagctgcgtgttggacgacaacgcggtgcccatgccgttggcaagcgtcgcggccgtggcggcaccgcccaaggcgttggcggccaccacagacacggttggccttgtaggaaaacactaataaattcttgtttattagtgttgtcttatctcttggtttaataccatccaaagaagtactgtcctgtcaggaaaacactaataattcttgtttggacgaatct

SEQ ID NO: 6143 - DNA, 933 bp, Zea mays
tctgttcctgagacagtcaagaaggcaaatgattatcctgttggacctattcttcttgggttctttgtctttgttgttgttggatcatgtaagtccttatgtttctgatgttttgtggttgatggtcttcctggacactctttcgcttttaacagttgagtgcatctgctgtctgccatcctaccaaatcagctcggaaccatctgttccgatattttaatcatcatcaatcctaagttcctaacacagtttcttgtcagttgttatttgtattacagtaacatgcttattattctgaagggtaatgctttatgtgccttggccatgctaaattgtggtacatgactaatgagcagcaagcagttctttgaaaagtaaccagcatttctgtgctttgaattttgaatttggaagtttggacttgttgaacctaaaatgttctcttggtttactctagatgtattggctaacaaccataggcattaactgtaccactctgataacgactcacagtggaatagagaagtacaaaaattgcagggcaagggttttataccgtagttatatacttgctcaatctaatatgaatatgatgcttccagagaattgtgagttttatgtagcctgatcattttttacccttgtgttagaagcatgcttatgagctatttgaatttgcggtctgagttatttactctctccttcatgcagctctctttcagatcatcaagacagcatcaaacgctggtttattctgaggacaattggtcacttacttttagtcactctaaagtcgaggaacagggttgacatatgcagtttgtcacttaaaaactatacaagtgtatggcgtagctggtactctacaatgtcgcctttgtaatgctgtaccatggagagttttaagttataatgtatagtccatatatatgc

SEQ ID NO: 6144 - DNA, 390 bp, Zea mays
gattgctagaccaatgacagcgttgctagcgaagaaagttgagtttaagtggacccaaaagtgtcaagaagcatttgaagaactgaagaataaattgactacagctcctgtgttagttctgcctgatgttcacaagccattctcagtgtattgcgatgcttcttacaccggattgggatgtgtgttaatgcaagaaggaagagttgtagcatactcgtctcgacagctgaagattcatgagaaaaattatcccactcatgacctggagttggcagcagtggttcatgctttaaagacctggagacattatctgtatgggcagaagtgcgatatctacacagatcacaaaagtctgaagtacatattcacccagtcagagctaaacatgag

SEQ ID NO: 6145 - DNA, 535 bp, Zea mays
tttaatgaaggagttgcagttctgctagttgacatagtggtggaagctgctctactttacagcaatcgaacaaccgaagctcgagtatgtttttcaacatacccatccaagatggaaaacgggtgccttggtaggaatatatttctagagccaacagtccatcatgagcttcaaggctctctagcacctcatgacactgttgttcctcctccttaccacttgtccactctagtgacagttgtctcagttccttcttattctcaagtttggctgcttctgcatttcttctccctgtcacattttcgagctgctttagcattaatgagccaccaatatttaaatcccttagctctccaaggctactacaactcaagccacttcccactacaaaccatgtaattgttcgaagcgaggtgatttgtccaagatctggaggcatgcactccaaccttgtgcacccatctgtgtagagatgacgaagggcactcatgtgcttcatttgctcaggaagtctaataagattcctgcatccaga

SEQ ID NO: 6146 - DNA, 410 bp, Zea mays
gcatccgcgaccggatggcgcgcgccgcgtccagctatgtatccaggagggggctctccgcagcgatgacggtggctgcggagtccgtgaagaaggtggaggagaaggcggtgaagctgggaacggtggccaaggacatcgccagcgccatggccaccacgacggaggagaagacggcgttctgggaacctgaccccgagaccggatactaccgtccggtcaccggcacgaaggaggtggacgccgccgacctgcgcgccgagatgctcaagcggaggattctgcaggacgactgacgcatgcagcatgcactagctgcccctgttcgatcgccaagatcacacgacgacgaagatactgtacctagtagtacgtacgtacgtgtacacctgattatccgaagaagatgg

SEQ ID NO: 6147 - DNA, 327 bp, Zea mays
  misc_feature (205)..(205): n is a, c, g, or t
  misc_feature (280)..(280): n is a, c, g, or t
  misc_feature (306)..(307): n is a, c, g, or t
ctgctgggaaatatctgccatttatatacagatcataaaagtttgaagtatatttttacccagtcagaactgaacatgaggcagagaagatggcttgagctgattaaagattatgatttggaaatccactatcacccaggaaaagccaatgtggtggcagatgcactgagtcgcaaggcttcctgccattgtcttacagtaaggncctctgacaccacattatgtcaagaaatggagaagttaaacctgggaatgatacaacatggaactttgacccaantaaagcttgagtcagttcttctacannaagattattgatgcccaaag

SEQ ID NO: 6148 - DNA, 469 bp, Zea mays
gcatggaggaagagcagagcccaaggctgggccgggatccggcgaccgagcccagtcctgcgccggaatggccggattcggacagcaagaacgacgacagtgcaaacgacccggaggaccctgccggcggcaacggcagcggcagcggcaacggcatcagctccttggagcagccgctgctcaagcggagcaccaccctgacggccagccacctggccatcgtcggcgccaaggtctcccacatcgagagcctcgactacgagtgagcattccatcttagcttgttactactactacctccatgcttgtcatcgtggctgatgatgaagtgcggctggctctgctcttgcgtcccaaaattgaattgctctgtctgtctgttctgttcttggcacgcaggatcatcgagaacgacctgttcaagcacgactggcggagccgctccaacgtcgaggtgcttcagtacatc

SEQ ID NO: 6149 - DNA, 405 bp, Zea mays
catgttcccggaccttccatggatgttggtgaaggaaaaggtagcaccgtctcaagagcacaatgaaggggctaggaagaaaggcaaaaggccaaacaggaaaggtggcctctgcgatgccgttgcatttgctgttggtgttggtatcgttggtgctggattgcttcttggatggactcttgggtggctactgccctagctggaagttccatcgacttccatgaccgtaaaggtgacaggataaatgcctcctgtgcacactagattgaatggcaatacattgcatggcaataggtaagttccaagtgtgtgcttcatggagagagagatggggcagctttttggtattcttccatgatactctgttgatttggtgatgatagcttgatgccttatgttggttca

SEQ ID NO: 6150 - DNA, 474 bp, Zea mays
cgacgtctgtttgccctgcgcctgcctgcagaacgaggtgtcggtgctgtcccctcgcgtggcgtttctggaccagcagcggaccatactgagcgtcggcaacagccacctcaagcagcggatcgcagctcttgcccaggacaagattttcaaggacggtaagtactgtacgtagtagtgcgtctcatctcatgcttcgtaatttctccgtcagctaatggtccgtatactacctaccatatgtgtatttcgttcttcagctcatcaagaggagctgaagaaggagatcgagaggctgcgccgggtctacgaccagcagaacctcaggatgtcagccggcggcggcgccgcttctgaccatgggccgccaccaccggtggtgcgcgctgagaaggagctcatgagctagcgaaccagtccatccgtgcccgatgtgcagtccgacttatcattaacatggagggaacattgcat

SEQ ID NO: 6151 - DNA, 901 bp, Zea mays
  misc_feature (883)..(895): n is a, c, g, or t
aggtgcataaatgaggctgctccagataaactaaaacctctgcatgtgtcagaggtatattttcatttttggccgaatacaccaatgcatttaatatcgttgctgctagtgatgcattctattgtgtcatttaatcatacaacagtattagagcagtttatttttgttggtgaaagttctgaggatgccaggacctcaaccgcaaataatgccatgctcggcttatgacacaatttgcaggtttcgcgtgagtttcatcctaattttgcagcgaaatggaggaggtacatgtatattttccctcttgatgaggatgctgacttgattttaggggaagcacagtcctcaaaaacactagagaattctgaacacaacataaagcctcaaagctttgatgtgtccaaggttgatgaaattctcaaaccacttgctggaaagacattatcctacaagatgtttgcacgtgatacacaggcttcacgaagtgtgtaagtttcatccaattccaatcacatgttcataacatgtgcatacaaaaatgggttcttacagattaatcttagaggctttatttcctgatcctgacgtagatgttcatcaggatcgtctcaaaattgttaaaaaaaatcacaggtgagagttatgtatctttatattaagaagaaaagggacaataacccttaaaacacacactgacacccatgtttctgagattagtagattacatatccttttttcgtgggaatccatgtctctatgttggcagtgacacttgttttggaggttactgaagtcaccatttctctcgatgttctacccttttttcagtggcccacctacagaatgtttcatgttccattcccgagctgcagtggccaaactnnnnnnnnnnnnnaaaaaa

SEQ ID NO: 6152 - DNA, 869 bp, Zea mays
gtgctgcattttctggtgacctcagtgtgaggaccgtcaccatagacataacctgcgcattcaattgagctcagaacggtatctcaatacagaaattcttcagtattcctatttcaacagtacctcttgaattatagcaggatcttcagaaaatctggatgtcaactttaggaacctatcaaaaccacctcgctgaatgataatggacttgtttgcatcgcttgcagcaagcttaaaggaaaaaaatgatgtttggtttattgaaagttgaatgttctcgtttcacaagcagaaaaggttgcagtgttgtaccatactaccataccttggacaacaaagagcagcaagatcttgctacagctttgttcttctgctcaccagccccgtcgatgcattgaagaagcacatcaattccaccattttcagatatggaacggcatatttcatcctgtggcaacacacaacagaacatggtaaagctctcctatgccatctcataatcaaaatggtaagcatgccagacagtttattataaagagtgtaacatttttcaagcgccagatttttctggatattggcctcatgaaaattaaattttaactggccagtgactgctagctacatatgaaagactaaaccagtaaggacctattagaggaggggttatcgaatcaaatccatagaatttacaatttagttcaaatcccaaacttgccagagtggataccctcctgataagctgtttcttccaactaaactgaagcttgaacaacttaaaaattgataacattgcaaagcttacattgactgcaatcgactttaaagcagcacaagcagatggcaaactggaaggagcgacttgctcacga

SEQ ID NO: 6153 - DNA, 922 bp, Zea mays
  misc_feature (914)..(914): n is a, c, g, or t
gtttgctggaatggtgcgtgtgttgaaggtgcctacagttcttcttgtcacttctggtggacagcagcaaggcaagagctctacagtttctgatcttgaggtatgttttgactattgtattgaagttaggtgaaaacattatttgcctttattcaagtctcaaggctcttgtcatggaaataataattgtctatttctgctttcctttgcttctgtttgctctgcagactttgtggtcctgaaattttatagaattgttctgatcaaatgggaaacatcagaacaaaataggcgtgctaggtggtggcaatgttaaaatgtgtctctaaaagatctacggtgacagtggataacattgttttctagttttcttctgttaaaaaaaagcaacacaccttgcttttcctatggtcttgcctgattcttggtgttttgatctgtctatttagtactgcgatgttaaaagttttgacttctgaatttatcatattctaatatgaagtagtgcatataaccacacataggtagcattaacagcctgctgcctctgatcggtccagttcagttctgaagaactgtgaaaaaaggatattataatttatacatgtaaaatgtgaagtttcttgagtcttagctcacccaattttttccccaattgttaggtactgcaatgcttaggagagcacttggccaagcacacggctttggaattttccaaaggaactgttctcaagagagggatcgaaaaatcaccaattgatcaggaaccctggcgcgagctgtatgggtgacggtgccctcatacagtttggtattagcttaattggctatacatgtttgactcggatgaatgatggtgttttatggagctggaatcacgaaggatctggtccgtcgaaaccactatatataangtgtcctt

SEQ ID NO: 6154 - DNA, 673 bp, Zea mays
ctggccgtgctcaaggctgcgtaccctaaactagtgagcacctttttctatcatttttatattcgttctgaagacctttgacctggatgcttacatgctcagttctgttctgtatcaggtaaggaaggagaagattttatctcccgatgaactgcggccgttccagaaccattcgacccagatggcagcgctggattacatggtctctctagcaagcgacattttcattcccagctacgacggaaatatggcaagggttgtcgaaggccaccgcaggtctgcatctttggattccgatcggagcttttcccgtctatttatcgtactgtgcattaatcgtcactactagtcggtagaagtatagctttatgctagttttgaattatccgcgggaagaaaactctctgcctaaacaagttctgcgatggctgtaaacgtcattgctgatctattctcaggtatatggatttccgcaagaccatcgtcttggacagaaagaagctcgtcgagctgttggaccttttccaagggggcgctctatcctgggacgaattctcggacgcagtgaaggaggcacacaggagccgcacgggccagcctgcggaaagaaaggtcgtcccagggcagcccaaggaagaggactacttctacgctaatcctctagaatgcctcg

SEQ ID NO: 6155 - DNA, 725 bp, Zea mays
  misc_feature (670)..(670): n is a, c, g, or t
tctctttgttcggcttattatcctctttatctggtgcatccttttgtcggcctctcattgatcgagctccactattactgtcgttattgactgtctggcgggcatttcctttgacttttgagctattaccgctaaacttagcatattccttgacaaatacaacttgtcagcatgatagaatgcaaaaaaaatagagtgcaaggtaacacctaaacgccactgtacttgatccatcctatggggcattcagggttgcaatttgataacagttcaaaacctgaacttatcaaatgatcaggacatggtagaaggcttcaactattagtagtccgtaaattagataatcacatacaaaaaaacaagaaaagaacattgtccaaaagtaaacaaattcatgcgcatttaaaaataaaccgcacatgaacctctggttcggaagaggtaccttttgcaggagagcgctagcacggttatccaagtttggagcacgtggtaaaaatgtctctctctcaccaagtgttgctggtgcaatttttgttgtcaggccaagctttggatccaaacgtattttctcccaattcccgtagccataccaatgaattccaaccatcaatctagcatcatcagctacaaccatacaagaaaaaacgataagattcccatgttttanagaatgtctaagcaattagggttgaaatgcaattactttcagtccatccacagct

SEQ ID NO: 6156 - DNA, 680 bp, Zea mays
  misc_feature (672)..(674): n is a, c, g, or t
gttgttatctttcactagtattgctgttttcccttattttctatcatgaatgtcttttttttctctcaggaagttgccttctagaattacagctatccaatatattttgtatgcagtcatatacagcttgctgcgaaggcgttgcccatcacaggaacaaaagctgaccttccaaaaaaatctagaaaagaggatcttgagagtgttgtcggcatggcttcatcagcaacagcaagtggtgggaagtttgatgagaagttgcctggcgagaaacctccaaagcaccctggcaaacacagaaaggtttttatatctgaatggttttgatttctgaatctgtaccttttaggctgattttgttcactagctgattgatgccgtttctgcagttcctcccagttgccgaagggaagggaatgggcagcctggagaaacagcagaatgacaaaatcctgaactctctacttgccagaaactctgatgaaccacttgatgtcggcaaggcaagttccaggatccaacgcttacatgaagttgtgttttaccctccattgatggtaaccctccttgttttgttcgggtgagctgatgacatcatctgttctaagcaggcaattacaatgtacaaggtgaaaaaggagaagcagagaaggaaagagaaaggcatgtcannngaaatc

SEQ ID NO: 6157 - DNA, 413 bp, Zea mays
gcaggaagaggcggtcgagatcgagaactccggtcaaaaggagatagaaggcatcgacagtttatccgacgagatctttgcctaaacattcctctgaaacaaccaaagacatttttgcggtactgctgttgtctatctagtgcgtcttttgctccgacaacataatggtagaacagcatgcctacagtgacaaacatgaaggcgaggactggatgtaccttgatataagatgcacattgaactgtatcttgtttgatagatgagctatataactagctcacgcagctgactgtatgatctgtagttcccccgttatctgaattgttcatgtattaggccatgtactgctcagcagacctatgtagttagttgcacttgtatgacttcagcatttctgttgccagttgtttgtt

SEQ ID NO: 6158 - DNA, 670 bp, Zea mays
tgagaaggaggtccgtgcctagataaccggctgcagtaatggtggcgtctgcaactacacgggccaacgtcccggcctctgttgaaaggagtccaccattgtaggtccctcgggaaagccttgacgacatcactcgtgaaagcaaggacagattcactcctgtatggtttggtattaggtgcgtgactgataaaatcagtagcgtgtgcttaatttaggttttgctgcacgtaatgctttgaaatggtcgcatgcactcatcgcatattaattataaacatacataccttcaagcacctcagaaaatacaaatgtgatgagagctgaaatgacatattgcggaatggagtagtgaggtgtgaaacgaaagctcatgattataccaatgagaaccatgacttcagatgccaacaaaatttgcctgcaaaagagaagggaaacattagcagctgttcattatgctttagagtaagttttaattccctaaaacaactggtgatatatctgcagagcatgtctcagtttaagagaaaagcagtgtccagagaatataaaagtttcctatagtatgtttcataggagtacaaaacttacctatcctcaaacaagttcgtaatgtagcttccaacgattgcatttactggaagaaccgttaatccaagaatcgcta

SEQ ID NO: 6159 - DNA, 700 bp, Zea mays
tgtatattactctgtttaaaaaaatgaagtttgaaataggtggtgtggtggtaggtgggataggaagtctgctagagatagcctttatgaaaatgttggtgtgcattatggacttttaaaaattgttttgaagtctaagctatgagagaaagttaaaaatgtgtttaattaaacatttgatttttgataaacctgttgtaagtctctcttacgagcggaatccacatctcatccatagtcctcccaacttggggcaggattgagtgctgcagcagggcccattggcagagcctttgaggcagacgttcggaccagtgaaaagggatctgggatatgctacacttacagctgcagcaaaggtagaaatttgaacattggctcttaacatcgctcctaggttcttttaggatagaaataagtaagtgctaatttgatcgtaaaaggtcacggcagtgttcttttaatagtgtcacttaggttcctatttatcgtctggcaataattaaagaagatatgtgcattttactcaccaaacagtctgaattgccaattcatactactcacattgagatatcacaagatctttgtagcttgcgcttggtacaagatatcctcaccacttgatgtcatgaaaacttgtaaacaggtgccttcgttggtgtttcactggaagggaatgtggtgacaactagaatggaaa

SEQ ID NO: 6160 - DNA, 482 bp, Zea mays
atggtttgcacagaaccatcagtcgcacattgtccatctctcaggtagatgcaatcctactgaaattagaaagcaagtaaatacataagtttttttttcacaatttaccactgttttcagacagggaaggccatagatatactcgtaccttatcttcctccgaagccaaatcagtcgcacgtttacatttttttgcatcacaaacatctcccgattcaattcattcttgaacacctctgctgcaagggccttctcctcatccgtcaactcctccatagcatcaactgtgtcgagacacctctcgatagagtactcctcttcacgactcttcttctcaagtaacacctccataatcttctgtgtttgcttcttcttgtgctccaaatagtcatccagaacacttgcaacttgacttttcttctgctttttccctcttctatatactgacgtaacagaaggtggagactgaacttcacaagcct

SEQ ID NO: 6161 - DNA, 358 bp, Zea mays
ctttcagcctgtggatgggcagcactgttttcttggctaaggttaaccaatgcagtcagaccatctgctgaaatatctccattgcggtcaattctaggttctgattcatcattggcaaattgctgggcatttcttgaaccgagcccgtaagggacacgtgagaagacgtaacgtgtaggagcccaggctgcaccaggcacatttgagttccctctcccaataccggcaaggccatcaactgctcctcttacgttaacacggacaggcccaagtacaccattcccatcgccctgggcatccgcaaggtagacattacctatggtgccggaaacactgctccggtcatgttcctgcctgt

SEQ ID NO: 6162 - DNA, 391 bp, Zea mays
tacaaaataacacggaaagggtccagcaactggtcgtcggtcgagtcaaaattcattttggatgacatcatcaagcatggaggccggctatacacgtgcgacatgtatggcacagtggagatgtgggcagagccgccccgcgcgtggccagatgaggaagtcacgcatcggtggaggttccgctgtcttatagagaccccagctggtgatctggtcagggttaagcgcctgtgccagaacaagtttgctgtttggatattggacaaggcgagctcttcctgggttgggaccgagaacattggggatctcgcgctgtttgtgagccactacaactcattctgtttccctgccagtggccagcccaacctgaaagcgaactgcatctacttca

SEQ ID NO: 6163 - DNA, 390 bp, Zea mays
gatcaaagtttcatatattgttttcattgatttagagttttaaattatgtttccctcttatataggtacatggtttaccagggttcccgatatcgatcaccgtcggagccccgccagagacagtatcaacaccaatgaaaataaattattattatttaaatgctatagttaaatattttttgtatggttatcaacatttattatttctgataacacgccatcgagccaattctgaataggcagtcatttttgtttgttacttactccctccgttccaaattataagttcttttgactttttggtacatcaatttactatgtatctaaatataatgtatgtctagatacatagcaaaatctatgtaaaaaaagtgaaagcgacttattatt

SEQ ID NO: 6164 - DNA, 1089 bp, Zea mays
  misc_feature (31)..(33): n is a, c, g, or t
agggcttcctgttaccactgttcagggttcnnngacacccaacagcataaattcctctaaaactgatggtacaaaaaatgaatacatgtcactccttgtactagttatatgtggccctaatattagtagtaatcagggtgaacatatgttggagcctgctgagggggcattaagtgctcaaggctcatttgatgaaggtgtcaccactgaacctccctagtgctgtgctgtcacatgaatagtaccgcatgttagtgttggctctaggacagggtgggttcactagatgaaaccagatcgagtgttatcactctccataattctagagaatccccacacttgtggtgcagctgccattcgccggcatggttgcgcttgcgctgcttgtgttgtggaccatctgaagtatggccatgacaatggggcatcatctgctctttttctggtatggatcaccacgcatatggcgagggatctagctactgctacctaagtttggaatatgtcgatttcctacttaagatttgccttgtaccttggctgctcattcatggatttgtcttgtacttacgttaggaggaatatgtcgattgttggtgaaacgatttcaggcttatgggcttgtcccttttatctttcaggtattcctagagaaagcttcagggtcattgtgaatgcccaggaacttggttttgaatccaccgaaactcccagaactgatagatcagtaagccttctctcctgtggctcttggtagtattcattagaagggcagacttgttagtattcaattttgaataagaatgggattttagccccttcagtcagcctccggttttatggctctcaaatattgattatgtatgaccgcatgtgggatatacgtacacttactttgtttccaactctgaatcagattctaaagaacttggagttcggcctggcagcactaggtggcgagaaaggagcagcctacgaccggatagttctcaacgcagcaatggctgaccacttgctaggctgcagcggagccgaggacatcgacgctgcgctcgaccgtgcgagggaagccattgatagcggcgaagc

SEQ ID NO: 6165 - DNA, 750 bp, Zea mays
cttcgtcgaaagcgcgtccatggcggttatagcgtcgacgctggactctctgttggacctgctgtcagggttcatactttggttcactgcgtacaagatgaaaaagccgaacaagtacaactatccaattgggaagaggcgcatgcagccagtggtaaggacattgttcgtcaaacgtagttactttggttgatttttatcatataaattaaagatgataccagtttgcattactcggctctcatttctgaatttctatgttcttgtctattcctctgaatcagttacttcagaagttaagcttaaaaaatcagttgcttcagaagcgtagctacaatgagttacacactggcatacttctgagttccacagtatctagatcattcagagtgtccacctttgttgccggcaagctgagtaatttgacatttatcgcagggaataatagttttcgcatcagtgatgggcacacttggcttccaagtgctcatcgaatcagggcgccagctcataactcaggtacatgatctgtgcttcacaattatcctaacgttaaatgttctttctgacttggatgccgatgagatgacccaatcaggagcacgcggatttcaagttcaagcaagagctgtggatggtcattagcatgtcctctgttgcggtcgtgaagttcttcctcatgctctactgccgaacgttcaagaatgagatcgtgagggcctacgcccaggaccatttcttcgatgtaat

SEQ ID NO: 6166 - DNA, 719 bp, Zea mays
gccgccctcccgcaccacgctcgactgcactgccaccttcgaccccgccaacaaggtcagcctctcccacacgctcgggtccggcggctgccgcgtcaagtacacctacgcgcacggggtcgagcgcctcaccaccatcgagcccctcttcgacaccaacaagaacgcctgggagttcgccgtcaccaggaagttagcgggaggggacgccgtcaagggcacctacgccgccaccaccaagctgctcggcctcgagtggagcagggactccatcgccggcggttccttgaaggtttgtgtttcatcaatctgtgcctcgacctagtaggatcctgattcctgatgaattctgcggcttcagaaacgaggaattcttatccggttttctaggcaatcaaatgcatgcttctattttcctattgtggtgttgcttcccacatcacttgccgacatgaaaccgtgcaaatgaaagcatggagggtgggtataaattgaaattgggtatgcacaatcgttggatgtaaaggctgtggtcaccaaaatcatcacctaaacctgaaattatgtgaaaagcctgtttgttgtgcgggggggaagtgagtcatctagtcagaatatggttttgtcctccaaacattttaattgccctgcatacagataccatgctgcaaaatttggatgttatagccagtggattatcttcagtcgagtgcagaagt

SEQ ID NO: 6167 - DNA, 404 bp, Zea mays
cagaactgcacgcacgcctgccccaaaggcctgaacccggcaaagcagatcgacacgatcaagaagctccagttgggtgccccaagtgcctgaaaccgagcgtgtcttcccttgaaaacggtcgtggaacagacctgtgggaaaaaaaattgggatgaacttgccacttattttgttgttgttgttgttctttggtcttcgcgcggtggtttctacctgccaaagacgaataattccaggctggggcccctccagtacactccacccatgcttttgtgtcaggcggagcggaggtagagcatagggagtgaataaccgctaccttatttcatttctatgatgtatctatctaatttggtcctcccctgataatgcacgacccgtagtgttaacaggcgtatttg

SEQ ID NO: 6168 - DNA, 400 bp, Zea mays
tgcttcatggataaggaccctcctccaacgccagatcagcagtgtacatacaacgtaccccctgcacagtgactgccgaacgattgcaggcctatctcagggttgtgtgatcttgtgattggggcggattattagtgccaagctaatcactccgttgatcgtcttgtcctcctctgttttcgccgcacccgtagatcttgatgccagccagccatatatcttctacgtgatttgtggtaggctccattatcagagggctgttgatcccattccccccgcacatctttttttctcttgtctttttttctctttttggttttttgtatgtactttgatgttgccccatttgtgagggatgggtgatcaaagaggagacgccatcccttctcgttctggaata

SEQ ID NO: 6169 - DNA, 395 bp, Zea mays
ctgcaagggcccaggggcgagcacgaggaaccgggtgccttggtcccgctcgctcacctacgacgaggcgcggccgttcctcggcccgagcttcatcaacggcgagcagtggctcaggctgtagatccgatccgtcctcccggctgccgagctgagcttcgtcgacggcgagctatggtccctccgtccgagctgtgtgtaggtcatgcgacttctctggtcttcttcggtgcatatagcgtgacaagcaagcagctagtcagactgtagacatgtacgctgtaccatatactactagtaccatgtacaaacctgatacccatatgtgatatgtgtagtgagatactgagatggccatgtccatcattcatggcaagatacatagtagtttgcat

SEQ ID NO: 6170 - DNA, 1246 bp, Zea mays
agcacatgaatgccatgaggttggtgtcctacacacccaatatttttacttcaaatcttccataaaaacatcaattttaaagtagtatagctgtttttttgaatgacaatccctgctaaagtgtgaaaagttaagcttcactgtccaaacacatggcaaactgaaccaacctccatttgtgctccactcttctgattatctctaattctctaatctctatgcaaaatattatttagttttcctgtaagctaatgttcatgtgaattttattgtgaacctatcatgcttctgccaactgtgctatattgtttatgatctcttttccgaattcaggtaattgcaaatagggcatctgagatccttggacacaagcgcggtgagaagtttgtgcacccaaatgaccatgtaaataggtcacaatcttcaaatgatacatttcccactgtaagccttaactatttttattccagtattactattactgctgcagatgtttcttattcatggcattgacatttccaggtaatgcatatagcgacggccgttgagatacattcgaggtttatcccaagtttgcaacagttgcatgattcacttcattcgaaagtattaacttctcctttccttaggaactattttactatgcttgtcagttgtcaaatgccttccataattatattgtgaccgtttttgtactatgcttgttagttgttaagtgccttttgtataactatatcatgacctattaatattatattatcctactgtgaatttgtgcctattgattatatccacctgctgattagggattcagattgaagttgaaacattagaaatttagaaaatcatcaaagatcttaatatttcgacattgcttgtacaagaactacatagcgtggctcctaactatgcacaagttctgtagcagtccattagagtcgcttaattcttttcctgattgaagttcgtattaataattaggtgcttcataccaatttgtacatgctaatgctaatgtgtaggatttgctaacctgactgtgcagactgttgagtttaaagacataattaaaattggacgtacacatacccaagatgccaccccattgactcttggccaagaattcagtggctacactacacaggtaggatttattctagcatcttttgttgtcttatttattaactacgcagttaagactaacaggtagacttattaactatttaagattctatgcaggtcaaat

SEQ ID NO: 6171 - DNA, 449 bp, Zea mays
atcaagcgaactccctccccttgatgttccactcccaggcattagcattccctcacctctaccagattttgtagagccatctaagacaaaagtcactactcttccaaatggcgtcaagatcgcctcggagacatcatcggtactgccctgctctcacatatgttgaagttctggttttgttttgttttgtttccgttcttttccatgacatcaatgttttcttatggacttaactcagagcccagcagcatctgtgggtctgtacattgactgtggttccatttatgaaacacctgcttcatctggagtatcacatctgttggagagaatggccttcaagagcacagtgaatcggactcacttacggttagttcgtgaggtagaagccattggaggaaatgtctctgcatcagcttcccgtgaacaaatgagctatacctatgatgcat

SEQ ID NO: 6172 - DNA, 379 bp, Zea mays
cgcgcgtcggccgcgcggacgaagcgcgctcgcgcctgtccacagccggatgtggagagagctacgcccgcctcctagccgctcaggttctgttcgtggacgggaagttggacgaggcgatcgcagcattcgaggagcttgcgcgggaggaccccgccgactatcgccctctgttctgccagggcgtgctgtacctcgcccttggaagggaggcggaatcagagtccatgctcgagcgatgccgcgaggtcggcggcgacgcgctaatcatagatccgtcagtgatgataacgccgaacgtggagacggaattcgatggggagaagccggagccggcgaaggtttgacctgtaactctgcagcggatgatctcataaaa

SEQ ID NO: 6173 - DNA, 843 bp, Zea mays
gtaactcattgcgtttagtttgtgtgtgcatcgtataaacttgcttgtacacttcaatacttcattttaatttatagattagggcatttggcactgaagcatttgcagatattgttgaatgctaaatgaatgggtctggcatgagccaatcatcaacttgatattctccaagatccatagatgatgaaggtcggtcaccagaatctaaaactgcagtaggaatattggtggccagttagtgtagttttcaagtgcttgcctggtttgggcatacgatgaaaaaaaaagaccttcaaattcatcattgtttcgaaagaatagttatttttcctctaaatggtaccttattatgacctttttttcatcattttctgaatcttaagttacaatgcttcatcgttaagcccctgaactctgttatatgtgtttggtttgtggtatatatgctcaggttcactgcggatttatgaaaaatagtggtgcagatatggatatcattgatgtcaagtacatacagaaatgcaaattcgtggttgcctctggtattttcgatggttacgacatccctcaccagccatccaatatcagccgccggtctcagaagctgttctgcttcctgatggtggtggacgaagtatctcttgattttatccaaaagaacaccaccgtcaagatcgacagcgctggagggaaatgggttggcatatggcgacttctaacagtgcaccgcctcccattcgacgaacctagaaggaacgggaaaatacccaagatcttgacgcacagactattccctcaagcttggtatagcatttggattgacgggaaaatggagctcatagt

SEQ ID NO: 6174 - DNA, 393 bp, Zea mays
gcatcttctgttactactgcatgtacaagtatattcccaaagagattccacgtttacccactaaaatgtccaaaagaatgttatgtaattctcagtgcagtcaatccgtgagcattgacataatttgttccagggtatgtatggggaatatttacctccgtgtaagttctgtaggcaaatacaaaactttgtacagtcagcaggaatagagatatacaataacgccagctggtacctgccggatcctcaatcttgagaaaggtcggccctggataagtagttattatcctcagcaatcaaatcaatagaaaaaaaaattaatgcaaaagaatgagcctctccacaatgaacatatccaagccagtaaaaataggtatttcgccagcactacat

SEQ ID NO: 6175 - DNA, 397 bp, Zea mays
cgccattgttctcggtagctctttggtggtagtggacaaggaggaggaacgggaaaatgctgatgagccacaaccagcggttctcggtagctctttggttgtggtgggtgagggtgagaatgcagagccctccaagtcgaatgtcgaagaatcaggtgccaagaaggaaggagcgaagcatgagacgagtgattcgagcaaggacagcgattactccatagtgtctagacagcgaactgcggaggaagaggatcttgagtgggatgagattgaggatctaggagagcatgaagaaaagaaaggcggcatccagacctcaagccctgctctgaaggaggagctgcgcaagaggctgagcattgccgaagatgatgaggatttaagctgggatatcgag

SEQ ID NO: 6176 - DNA, 424 bp, Zea mays
tcgcattacaaataaaacaaaaaacaaagatgcgtgctttggtcgttttttattttccgattcgggataagctcccccccttttttttcctggctgcattttgctgcacactggtggaacctcccgatctcgtcctctgcctgtaaagagttcgcgggaatcggtggatctttccgtcatctggccagtggccacctgatttgttcgtgattttgcccccctcttccccgcaccacccagctccgctcctgggtttcactctgaccccgtgtttgggctgggacaaggagaaaccgccaaaggagagatttcagatttgttttcccgcgacactcggaaacacaagtgtaatcccccctaccgttctctctgcccaagtgtcgccattaatggccaggcctctcccataaagcaccatcaattc

SEQ ID NO: 6177 - DNA, 477 bp, Zea mays
aatatcttccgtacttcgttcattatcttcgtgtttgtgtatgtgtgggtatgtttctatgctttcctttagtctgacttgtttgttttgcagtggatgtacatcattccgcttggtcttattgtcatgaatgctgttacggcagctgccaacataccagaggaagctgcagggcagggccaacctggagcacaacgggcacctgctgctgttgctgggaggaggagatgatggctgccttccataccgtagttaactatcttcacattgttttctgttttttttggggtattgtatcaatcttaccttgactgcatcatctatggcactgcatgatgatgccatcttttgcttgtgttgaaacacgtagcctatccaagacaatgtggttcctatacatctgtagccaattttggccactagcatgccattggacactgaaactttgcttgaagcctgtgcacacatcatttgcag

SEQ ID NO: 6178 - DNA, 964 bp, Zea mays
aatggacaggggacaattctctggctgaaagtactaactgccaaagggccatgcaccttattctcaggttgtgtctctcagaggggtgtgatacttctccagccttgctttgtgctgatggatgctccatgatagaccgaagaatggtaggctgcccacctcattccagctacttgtgttttcttattatgtttgactttgtatctcttgtacctcttatgtcttactaggaagttatcattcaattgcatccttgcaagtcccatctcgttcataactgaaactgctttagctcatatatatatggaaatatataaatacttcggatatttttctttctgggttctataggagaaaccatttataggatgctgttgtaggcttgtagctattaaaaatcaggaccaaagacttggaacataagaggattgtgaacattaataatggttcaatgtatgggttttggaaacatacgtgaagtatgtcgttgtgatttgtggataacagcatagattgctttgctgttagcgaacactttgtcaaacttcttaatcttctctatctctatgcaagtgttagtttcttttagtttgatcgtgttctttgtcttattgaagtattgttaattcccagtggttgtgcttcctgtagactacatattcatctcgtggaaaacctagaaaatttaccaaccattttgacgcttttcgtcctggcctcctgggaacagcaagttatctaaatgcttgtcttgaacgtttgtacatgtttatcatgcaccttgtttatcgaactgttgactgaaatctgtgcagggcatatatggctacccaattgaaatccaggctctcttttttatggctatgagatgcgccctgagtctgttgaaacaagagtccgatgctgacttcgtgaaccacatcacaaaaagaatccaagctctgagctaccacttgcacagtta

SEQ ID NO: 6179 - DNA, 535 bp, Zea mays
tcaacccttcaagcatttcaccaagtgtccagttctcccttttattgggattttcctaatgcttataaaaccaagggatgccatggtgttgctaacgatccatccccgtttcctctgtaggggaccgtaaagttgcggcgatagggatccacggttctcggatgatagtttatcacgggctcgcactaaacataacaactgaccttgctccattcagaatgattgatccttgcggcataaaggaccgcggtgtggggagcattaaggagatactacaaagggtgtctgatgcggaagagatcgatgacgcgtcactgatggatatagtgtatgattccatgatcaaggagtttgcggaactcttccagctcagtctagacttcagccctggttgcagtttccagtgagaacaacgcttttagcagaccgtatgatgctgccgttgtattctggacggaatgttagctcacggcctttcgtgctcggtatctccgtgtctgctgcactccaccatgtataccacatccacctttca

SEQ ID NO: 6180 - DNA, 1238 bp, Zea mays
  misc_feature (60)..(65): n is a, c, g, or t
cgactccgcgatagtaggcgctgaacaagccacacccacgacccatggaccctgagtgcnnnnnncttgctgccagcaccactggtcacgacgcactccttgacgatgccactggtcagagttatgcttagcaaacaagaactaaccatatcatgcacgctaatctcgacatggttgatgcttgacttctggtcaaattcttaaatatgttctttgtcttgaaactcgaattcagaagaaataataaatagaaggctatgacaatcactgcataaatagcataaaagctttcagtttttccaatgttacataacatacaaacgctaaccaatttatgtcatttatttaaatcatttcatgccaatgtcagtcatcaaaatgttaagtcataaagatttaacaaaatattgaaacccaatgtcagtaccagccaaatcgaattccatggataagaatgcaaggatagcttgaatcctgaaacctgtgtcaatggtgataggtttcaggatagcctgaatgcaaggatagccttaatcctgaaacatgtgtcaatgtaaaatcctgaatcatgaaacctatgtaaatagcagcaaaatgcaaaaggcttatcagaatgtactcttaactggcaaccaatactccatgtacatgtttcaggattttacattgatgcaaattgcaaaaagtggattatgtattaatagtttctcgattttgtttatcgctgtcatataaaagattattttttctttttcattcaaacaagggaaccttaaaaaacatttggtggatcacaaataaccaccacaccactaatatagtaacctaactcaaactgatagagaataagacatcatgtgctaaaacaaaatagtctgagtctctaagattgttctctatcactaataagaacagaatgaggctacactacttattttcctttaaataagttatacgggatggaaaacaaattatcaagatacctgaaggcttggtcatatccttagcacaagatgtgtaaccatcaatagaggtcttgaagaagacataagctctcttcttgtccagcctagtcatgcacatctcaagagtaacaacaagctcctcaggggtgctcagtggtggcatagtagacgtgccacttctgcttatgctttgcagaatcaccaatcacataagcattaccaccaaacctgaggccatcgaagaagtgatttaggaaggtaacctcatcaaca

SEQ ID NO: 6181 - DNA, 361 bp, Zea mays
gccgcagtgggcggaccagccgacgacggccaagtatgtggagagcgcgtgggggattggggtgcgcatgcggaagggttccttggtgaggaaggaggtggagaggtgcataagggaggtgatgggcggggagaggaagcatgtgtacgggaggaatgccgctcgttggatgcacaaggccaaggaggccatgcaggaaggaggaagctctgacaagaacattgcagaattcgcagccaagtatttaccaaagtagatttccgattatgttctcctcggataatgagttttttgggcaataaagtttcttgtctttagggctaatttcgaaacttatcgtgtgcttggtttgtagagtcac

SEQ ID NO: 6182 - DNA, 500 bp, Zea mays
ctctcaagtatgctggtcccttttcatgtacacatgctatgttttttattggcgctaacatgctattatcttgcgttgcctccagcttctttaatttaggtgcttttatcaatgagtttgtaggcacaaaagctcataagcctgtgtggatgggagcctaggtggcttccaaatgttcaagactgtgaagaaaattcaacgcattcagctaaaaatttaccctcagttggacctgacgaacggttatatccccattttgttgaacataacaaaaattcattttctgcatcagccaagaaagataaggggaaaggcaaattgcccgttggagattctggatgcagcatgaggtcaccgttgttagattgtaacctgtgtggagctacagtcaggatgcgggactttagacctgtattatgtccttctcgtttcagtccaaataacattgttgtgcctggaacaggcagaaagctaacactgacacatggagttagtgctgc

SEQ ID NO: 6183 - DNA, 550 bp, Zea mays
gtgtcgatacttaaacagtacaacagaaattttactaaagggttcatgcagttatgcatacagaattgtagttcttgtcatattccttgagtaacccagctttagttcaattcgtttggggtggtttcatctcacaagaatgcttatcaaatgctctttgcttctgtaggcagaatttgctgcctgtgctgttgattttttgcacagggtgggccgcacagccagagctggtcaatctggtatagttactagcctatacacagaggcaaatcgtgatctggtaagagcagttcgtcaagcagaggagttggctcagccagtggtaggattctgttttcatcaccctctggaaggttataatatatatatttttttttctggagaagcatttgcataataaaaatgttaatgtttaaacaggagagagcattcagcaggaaaagaagctttcgcaacaaactaaagaagcaagcattacaaaaacgcgaagcactggtatcttgatagcgtgactcactatatttgtagtaaggagaaaatatatgttttt

SEQ ID NO: 6184 - DNA, 350 bp, Zea mays
ctcgcgatggatggcttcgacgtcgtcctcggggtacaatggctgcgtaccctggggccgatcttgtggaacttcgccgacctcaccatggcgttctggcacaaggaacgggctgtccgctggtccgggatcggtggccctcagccgcagctcgctgcgctggccgtcacgagggatctcctgacgaccctactcgactccttcaccgacatcttcgacgaaccgcgcggcctcccaccccctcgacgccatgaccatcgcatcacacttctgccaggaacaacaccagttgcggtaaaaccataccgttacccgcagctgctgaaggatgagatcgagaaacaatgcga

SEQ ID NO: 6185 - DNA, 1132 bp, Zea mays
  misc_feature (1117)..(1120): n is a, c, g, or t
  misc_feature (1122)..(1126): n is a, c, g, or t
ctcagcattgcacacagcaacatcagctgcagtgccctgtggtgttaaaagaaaataatttcagcataaaactaattttccaacaacgaattgcaatagaaagtaaccacttgcataggagcattgatagcagcatgcttaatgtgacctctttggccaaaagtcgcatgagccatatttagaaaacggcgtgtcacatgagccatatttagaaaatggcatgatcgccaaagcaaagtataaaattcacacttctcatgtgctagctgtttctgtttcacttgccaagccagaaccttctttctattgctataccagagtttcggtgtatcttttgcttccttaacaaaaatctgacaagagagaaagggttacaagagcccatgaaggctacatttcttgtaaacatcgctactcaacaagtttgttgttttcaggtttctagctgaccagcacaaaccaatccaaaggccaaagctcatatttaagtgtaatgaacactaaggttgattgctgcttaatttagagctatgtttgtttgacaagtttgtaccttcctacgtttttccgtatgcaatggagagatttagcatcttatagctttcctcctctcagcaccaaaagcatcctacatcacaagaaaaagcattagagtccattttgttccatacatgccatgtatattttcatgctaataatatttcatagatccatatccataattaacccccacagtgtacaagttctggaccagacgacatggaaggtataagaaaaaagaaaaaaattgtatgtgtgtggaagtgcagtacaaaagctaataacctggtagtgaacataattttaacatttagaaggaatcaacagaattctcaaaaacaccattaaaggtagcataccttcaacaacagcatgggagatttctcttgatcgggttgaggatgctactcaagaattactttctcttcttcaacagtctcacgaatatgctgatacatgctcatggttgtcctggaatggaaatcacagccagctatgaaagcatctaacatgcttttgcaatcagcaggatgcaccaacatcacgagttccagctgcacgcaaaacaagtttgccnnnnannnnncaaatc

SEQ ID NO: 6186 - DNA, 1017 bp, Zea mays
  misc_feature (999)..(1000): n is a, c, g, or t
  misc_feature (1014)..(1014): n is a, c, g, or t
tcttgatctgctgtccaatatcagagcaagttggttggtcttgaagtggatttatatggcagcggagaagattctgatgaggtctgtgaatctgccaaacgtttaagtttgtctgtcaatgttcatcctggtcgtgatcatgcagatcccttgttccacgagtaagtttcttatttactatactcattccgtcttattctgttagacacatttgtacctgtgtaacatgcctaacacatccctttagagagtgaacgcaaaattggtacttccattgtcaacagtcaagacagtttttttgcaatattattagataaatgtgtaggttttgtgatcttaatgaactgaaacacaggttagacaaagttatgtaaataagattagggaatgagtggtaatgttagatgacctggtagtttcataataagataagatttaacatttctggtgtacccatagtcacaaagtttccggatcaacggggtcgaggaacggagttgagaaacatggtacgctacttgtgagtggtttttacatggtgggaacgaaaatgaccctgcattcgaggacgtttccgggttgagggtcgctaccactgtacccgtttcttgtgactatgggtgtacataggatacaccagtggcagatctagcctattgctgtgcgggcacatggctccacaactttttgtcagaacatgtttaggcccttattaaaattacaattgtaaactacaatcaacttgcttggccccataggttttcaatcctagatacgccactgggatacaccaactgtttgtgctagactgaaagtttgaaacactgattctccaacaggtataaagtattcatcaatcccagcaccacagatgtggtctgtacgaccaccgctgaagccctggcaatgggaaagatagttatatgtgccaatcacccgtcaaatgagttcttcaagcagttccccaactgccgtgtctatgacaatgaagacgcagtnngtacaactaacacngaa

SEQ ID NO: 6187 - DNA, 373 bp, Zea mays
tcatcatgagggagttcaggtccgggtcctctcgtgtgctcatcaccaccgacctgctcgcccgtggtatcgacgtccagcaggtctcacttgtcatcaactacgacctgccgacccagccagagaactacctccaccgcatcggccgtagtggtcggtttggaaggaagggtgttgccatcaacttcgtcacccgcgacgacgagcgaatgctgtttgacatccagaggttctacaacgtgaccgttgaggagctgccggccaatgtcgccgaccttctctagatagtatggctgctaaggtttctggataaaggagtttgtttttgttaaaatacgccaacttttctctgctttggatgagtgggtaaggt

SEQ ID NO: 6188 - DNA, 401 bp, Zea mays
gcgctctggcaaggagcttgagaaggagccaaagttcctgaagaacggtgatgctggtatggtgaagatgatacccaccaagcccatggtggtggagacattctcagcgtatcctccccttggtaggtttgctgtccgtgacatgaggcagacggttgctgttggagttatcaagagtgtggagaagaaggacccaaccggcgccaaggtgaccaaggctgctgccaagaagaaatgatgcgatcctgcgcctgctttagcaatacctagttttcatcattacaagttttgtttgtggtcgttgctgttattgtgtgaactgttgagctctgttagcctgtgcacttttatctatttatttggtaccttcttgctatttcaccttctgcaatacaagaatg

SEQ ID NO: 6189 - DNA, 371 bp, Zea mays
tgtcggtgacgaacgcgcttatcaccacatacgccaagtgcaagagggcagacctcgctgcccaggtgttcaacgagctgggcaacaaaaagacacggatctcatggaatgccatgatcctcggcttcacgcagaacgaatgccctgaggatgcagagaggctcttcgctaggatgcagttggaaaatgtgagaccagattcgttcaccctggtcagcgtgattcctgcagtcgcggacatttctgatccgctgcaagcaagatggatccatggatattctatcaggcaccaactagaccaggatgtctatgtcctgacagcccttattgacatgtactccaaatgtgggcgtgtcagcatagctagaagg

SEQ ID NO: 6190 - DNA, 432 bp, Zea mays
gaagagaacttcgaaggccgctcagccttccaagaggaccatccagaggcgcgtcctgatgtccatgcgatgagctgagaaagctatctgctctgccatggcttccctttgtctgctgctttcttagcggcaaccggcaagtcgtaaccaaccattacgccagttttgcctgaaggaggggtggggccgtgggggctcctggttctctgcttgaggaccccggggtatgcggcttactactagctctctgcttgagggtacacattattatggtgaccgcgtatatcctctctacgattttaagcaccatgaattagtgctacgtggtcttttttagtttgagaaattagtagttctatgtatagttttatagtgtggaacggatatgagaaattagtagcaattgtgacttcgacagcttgaatactgttg

SEQ ID NO: 6191 - DNA, 915 bp, Zea mays
gttgcgtttctttctaccttcagtgcaaaggccagccttcgtcagaagatcgagtgtaatacctgactgccatagcgtttgcatttcgttgttttcttcctacttatatcaaaagcacgtaggtgttgcatgatgaagttctcatgattactcacttcctcaacgtttttctttgtctgtttggtgaagcagttatattcaaggtttatgacatcgatggcaagggaaaaattaccttcaaggatctgctagaggttttacgggacctaacagggtcattcatgtccgaggaacaaagagaggtgcttattatatatctaaattggccgtgtggtttttatacggaattgtgcaatatcagcgtgagacatatcatattgacgtcttgcagcaagtggtaactgaagttctggaagaagcagggtacacgagggattacgcattctcgcttgaagattttatccaggtgcagaaatccttttccgtgtccatatatctgttttccctccctctgaacacatgcaagagaattgcgtgttgctgtattgatagcctaggtagaaacaatccacgcaaaaagcgcgtttttttctattaagaggggaagcaaaggcgttagtaaagccaaaatccaccgctgtatcatatcataggctatttgcatattcttcgatgtctattgcggttccatatccatctacaaaccttgtggccgtcttatatgtcggtagcacgtctgagaatgtgttcttgtggctgttgtttcagatcatcgaccatcctggccttaagatggaggtggaagtgccaatcgactagtgaaatgtggaaaacaagcttccggttttgtctgcagaacatggttagtgtcatgtagcagggcaatgaccgttcactttcgtcatcttattgttt

SEQ ID NO: 6192 - DNA, 699 bp, Zea mays
gagcatcataggttctactgtacagtttgccctcttgaaagatctaagaataaagcctcacctggtccgtgtaaaggccatcttatgagaaaattcattaaagaatgctggagtaaatgtggatgtggcatgcagtgtggaaatcgtgtgattcagcgtggtataacatgcaaattgcaggtatgtttaagagatttgcaatgccatgtttctttctaaatggtagtaaccgagagcttattaatgtgcaatatttgctggttatggtcttctctaaaaaatgaccattgcattgaaatgccttcatttatgtgctgctgtatgcctatatgcttatcatgtgtatagctagttttcccaaagcacaccaaaaaagtactatgtgtctttgatccattcttgaattttatctagttcatggttctcgtatgttcctccacttggcttcagttccataaacaactattcctttatgttgcaatactacatggtataggtgttctttacacgcgagggcaaaggctggggagtacgcacagtagaggatctcccaaaaggttcctttgtctgtgaatatgttggagaggtactaacaagttctgaattgcacgaaagagcaattgaaaatgcaagaaatggtaaacataagcatcaagtactcctggatgctggttggggttcaggtgtattgagggatga

SEQ ID NO: 6193 - DNA, 605 bp, Zea mays
tcgaggaactggacaagtacatctcagcctcgaagaagcagaggaggaagcagtgagttctctagtactgcagctactgcccttatgcatttgatctaaactccgttgttatgtcattattagtaggagatgtaaacaatagtgacatgcccttccatgaacttaggcacctggatgagaagaaaaagaagcgcaaggacaataagacagaaactctaccagactttcctgggcgcgagaaagtcaaatttggtgaagttgttgtggctccaccaaaattgtcattcccgaaggtagttacttctccacatggctctacatgaatccttttgtgcgatctgtattctggattacacatcgatggttctatacttctataggtgaagagtgcttcagatgcttctcgcgagatgctgaggaaagaggcaattgagaattacagatatatcaaaggctggacatcgaggcctggactgcagcttccaacgctagcagaatcacaatagatattttctctgtttatcgttgtcaaacttactctgtttatatcagagaagtttagagtatcaattgtgtaatttgtactctcatgtaggcaattccga

SEQ ID NO: 6194 - DNA, 483 bp, Zea mays
gttgagatccctgtcaccgaggtggtccttgctaagcaccctagaccaccacttctcatcaaccttgcagagtgctcttaggtcattgttactaattattttttgtacaatgtgcaatctgtgcagaactccacaattgtatgggaactccgggtgctgagttgggaagtgagctatggcgccgagttcacccccgacgcggagggtgggtacaccgtcattgtacagaagacaaggaaggtgcctgctaacgaggaaccgatcatgaagggaagcttcaaggcaggcgagcctggcaaacttgtgctaactgtgaacaaccctgcatccaagaagaagacgctcctttacagatcgaaggtgaagagcaccagcgagtgagtgtgaggtcacgccgctagctgcctgggccctacagttaaaacgatctacagcatgatagaagagagaaggaaccttttggtttggttcgttaatttactg

SEQ ID NO: 6195 - DNA, 595 bp, Zea mays
  misc_feature (588)..(590): n is a, c, g, or t
cgagagctgtttggaatcccatatgccagatacgcctgcaatgcaggtgaataacacacaggttaataaagtttttttttaaaaaaaagcataaagcataaaaaaaaatcttgtcgctgtagaacatatatatccagcattacatgcatgataagcgaattgtaaacgttaatccagaaggccaacttaacgctgttctccgacacgctcagatcaactctttcaagctgttccacaagcaacctaataaaaacccaagagagaaaggaaactgttacttgcgaatttcaggagagccatttgatcagggcatggttttgcagtgatttacttttggaaccaacctgtagtgggtgatcgcgtaagagacatctggcatctggttcttgtcaactgatatggaagctatttccaccgccgtgcacttgttgttcggtgtgctgttttcctctccgttcacccgccgaggaaggatgacattcgtggatgatcttgacaagaatggcgagcgggccttctcaggctttcctgctggcgcctcggtgcgcagaagatagtatatggatgccatgcatctgaccatttctnnnggata

SEQ ID NO: 6196 - DNA, 471 bp, Zea mays
ctgccatccaccacatccccgggccggagggcgtgcgtgggcgcaactcagacaacacgctcatcaaggagaagcttggctgggctccgactatgaggctgaaggtactccaccaaacctcgcacgtaccatcgctccagtccctgagctggatcacacctacatagtctgatcgttcattgcactggactcaaatttggcctgcaggacgggctgaggatcacgtactcctggatcaaggagcagcttgagaaggagaaggccgagggcatggatctgtctgtctacggatcatccaaggtcgtgcagacacaggccccggttcagctcggctccctccgcgccgctgatggcaaggagtgaactttggctgcgccggtcagttgcagggcatgatataccagtaatacacagttgtttcagtttccatgatttgtagtcaccatttcttgattcacatttgactccaca

SEQ ID NO: 6197 - DNA, 465 bp, Zea mays
atgattttatcagtgtagagcgagatagttttgtgcctattcatgtaaagccggctgacatagcacggctcaatgactcagcgttataaatgaatgaacacgatagtttaaaatggttacaggagaggacagatgaatatcgtttaaacaaaaacgatatgggtgaggtggtggatgattttgatgatcttggaaagttaggacaggggttctcatctgttgatgaactagaggaagtggacattggagacggaaaggtgccaaggccaacatttgtaagtgctaaattaatagccgatcagaggcaaaaggtatgtgatttacttagagaatttagagactgttttgcatgggattatactgagatgccagggctgagtagggagttggttgagcataggctaccaattaagcatgggtttaggccacataagcagccacctagacgatttaaccaccacatcc

SEQ ID NO: 6198 - DNA, 381 bp, Zea mays
tgcttccacctgtaagcttgcaatggatttcccagatgtacttgcaacattgccgttcagaacctcttctgcacatttcaagtgtggttttgagaaaccgtttttcttatgtgttgaaccattcttgttttccaacttggcactatccgatgagttggtgttgttttcctcacagcgatgttgattaaccttctttactggtgtaagggtcaggtgagcttcaagaggctcagctttgttcacaatggaggacactgttttaccatgcaagtcaatcaaatggtagagggatgatgccctggtagaaatctcagcatcccgcttgcatctcatcagtgcagagagtgaattaaggcatggcctggaccgacggaataactc

SEQ ID NO: 6199 - DNA, 552 bp, Zea mays
gcacttgtgcgtgagctgcaggcgctggaggagcatctcaaagcccacgtaataagcctgacctctctgtctctctgactgaatgtgtttgtttcacagacggaccctgcttcgtcctacactctcaatgatgctgtgtctgtgtgcaggggcggccctacatcagcggggagagagtaacagccgccgacctcagcctggcgccgaagctcttccacctggtggtggcgctggagcatttcaagggctggaaggtgccagaaagcatgtccagcgtccacgcctacacccaggtagtagcatttccagagtgcttgctcatcaagatacatcccatcccgtatgagtatgacctgccctgccccacgatcgtcttttgtgccgcaggctatgttcagccgcgaatctttcatcaagactaagcccaccaaggagcacttgatcgcgggatgggcggcgaaggtggccaagccgcccaacctcgtcgtgccttgctggctcatctgatcagtcgccgtcggtggtgcgttgctggttcattatgattgggtt

SEQ ID NO: 6200 - DNA, 245 bp, Zea mays
ggccggccgcgccgattggcatgcatggacgaggtctgtctgacgaagatgtgtcgagacctcgccggcggtgtggtttgtgatgattgattggttagttggctaatcttcagtagctagctagctagctagctactgattagaacagctagcagtagtgtgtaaccgcgcgcgtgtcgttgcctctgctggtcgagaggattgaagcacgcattgtgtacataataataggtaggagtcgtcgt

SEQ ID NO: 6201 - DNA, 1435 bp, Zea mays
  misc_feature (349)..(351): n is a, c, g, or t
  misc_feature (358)..(363): n is a, c, g, or t
  misc_feature (367)..(373): n is a, c, g, or t
  misc_feature (379)..(380): n is a, c, g, or t
  misc_feature (383)..(401): n is a, c, g, or t
  misc_feature (403)..(403): n is a, c, g, or t
  misc_feature (416)..(420): n is a, c, g, or t
  misc_feature (427)..(435): n is a, c, g, or t
  misc_feature (439)..(454): n is a, c, g, or t
  misc_feature (456)..(458): n is a, c, g, or t
  misc_feature (462)..(464): n is a, c, g, or t
  misc_feature (477)..(484): n is a, c, g, or t
  misc_feature (488)..(489): n is a, c, g, or t
  misc_feature (492)..(498): n is a, c, g, or t
  misc_feature (503)..(508): n is a, c, g, or t
  misc_feature (511)..(513): n is a, c, g, or t
  misc_feature (517)..(529): n is a, c, g, or t
  misc_feature (531)..(533): n is a, c, g, or t
  misc_feature (538)..(545): n is a, c, g, or t
  misc_feature (549)..(549): n is a, c, g, or t
  misc_feature (551)..(553): n is a, c, g, or t
  misc_feature (555)..(556): n is a, c, g, or t
  misc_feature (560)..(561): n is a, c, g, or t
  misc_feature (564)..(568): n is a, c, g, or t
  misc_feature (573)..(581): n is a, c, g, or t
  misc_feature (583)..(587): n is a, c, g, or t
  misc_feature (590)..(596): n is a, c, g, or t
  misc_feature (603)..(606): n is a, c, g, or t
  misc_feature (610)..(612): n is a, c, g, or t
  misc_feature (614)..(616): n is a, c, g, or t
  misc_feature (618)..(618): n is a, c, g, or t
  misc_feature (621)..(639): n is a, c, g, or t
  misc_feature (641)..(652): n is a, c, g, or t
  misc_feature (657)..(665): n is a, c, g, or t
  misc_feature (670)..(678): n is a, c, g, or t
  misc_feature (685)..(686): n is a, c, g, or t
  misc_feature (688)..(696): n is a, c, g, or t
  misc_feature (702)..(707): n is a, c, g, or t
  misc_feature (709)..(709): n is a, c, g, or t
  misc_feature (715)..(715): n is a, c, g, or t
  misc_feature (718)..(718): n is a, c, g, or t
  misc_feature (730)..(736): n is a, c, g, or t
  misc_feature (738)..(741): n is a, c, g, or t
  misc_feature (749)..(756): n is a, c, g, or t
  misc_feature (760)..(760): n is a, c, g, or t
  misc_feature (765)..(777): n is a, c, g, or t
  misc_feature (779)..(781): n is a, c, g, or t
  misc_feature (789)..(796): n is a, c, g, or t
  misc_feature (798)..(801): n is a, c, g, or t
  misc_feature (805)..(806): n is a, c, g, or t
  misc_feature (808)..(809): n is a, c, g, or t
  misc_feature (820)..(830): n is a, c, g, or t
  misc_feature (832)..(836): n is a, c, g, or t
  misc_feature (843)..(856): n is a, c, g, or t
  misc_feature (858)..(874): n is a, c, g, or t
  misc_feature (881)..(881): n is a, c, g, or t
  misc_feature (886)..(888): n is a, c, g, or t
  misc_feature (893)..(893): n is a, c, g, or t
  misc_feature (896)..(898): n is a, c, g, or t
  misc_feature (900)..(906): n is a, c, g, or t
  misc_feature (908)..(909): n is a, c, g, or t
  misc_feature (912)..(916): n is a, c, g, or t
  misc_feature (919)..(919): n is a, c, g, or t
  misc_feature (921)..(927): n is a, c, g, or t
  misc_feature (929)..(938): n is a, c, g, or t
  misc_feature (940)..(946): n is a, c, g, or t
  misc_feature (949)..(950): n is a, c, g, or t
  misc_feature (954)..(982): n is a, c, g, or t
  misc_feature (984)..(991): n is a, c, g, or t
  misc_feature (993)..(993): n is a, c, g, or t
  misc_feature (995)..(1002): n is a, c, g, or t
  misc_feature (1008)..(1009): n is a, c, g, or t
  misc_feature (1013)..(1015): n is a, c, g, or t
  misc_feature (1026)..(1041): n is a, c, g, or t
  misc_feature (1043)..(1046): n is a, c, g, or t
  misc_feature (1048)..(1055): n is a, c, g, or t
  misc_feature (1058)..(1065): n is a, c, g, or t
  misc_feature (1067)..(1067): n is a, c, g, or t
  misc_feature (1070)..(1076): n is a, c, g, or t
  misc_feature (1083)..(1084): n is a, c, g, or t
  misc_feature (1089)..(1091): n is a, c, g, or t
  misc_feature (1093)..(1107): n is a, c, g, or t
  misc_feature (1110)..(1115): n is a, c, g, or t
  misc_feature (1118)..(1121): n is a, c, g, or t
  misc_feature (1124)..(1127): n is a, c, g, or t
  misc_feature (1133)..(1139): n is a, c, g, or t
  misc_feature (1143)..(1144): n is a, c, g, or t
  misc_feature (1146)..(1148): n is a, c, g, or t
  misc_feature (1152)..(1152): n is a, c, g, or t
  misc_feature (1154)..(1156): n is a, c, g, or t
  misc_feature (1158)..(1165): n is a, c, g, or t
  misc_feature (1169)..(1183): n is a, c, g, or t
  misc_feature (1186)..(1193): n is a, c, g, or t
  misc_feature (1196)..(1197): n is a, c, g, or t
  misc_feature (1204)..(1209): n is a, c, g, or t
  misc_feature (1212)..(1212): n is a, c, g, or t
  misc_feature (1217)..(1218): n is a, c, g, or t
  misc_feature (1220)..(1223): n is a, c, g, or t
  misc_feature (1232)..(1235): n is a, c, g, or t
  misc_feature (1239)..(1239): n is a, c, g, or t
  misc_feature (1241)..(1243): n is a, c, g, or t
  misc_feature (1245)..(1247): n is a, c, g, or t
  misc_feature (1249)..(1252): n is a, c, g, or t
  misc_feature (1254)..(1263): n is a, c, g, or t
  misc_feature (1270)..(1274): n is a, c, g, or t
  misc_feature (1285)..(1285): n is a, c, g, or t
  misc_feature (1287)..(1288): n is a, c, g, or t
  misc_feature (1293)..(1297): n is a, c, g, or t
  misc_feature (1300)..(1301): n is a, c, g, or t
  misc_feature (1303)..(1317): n is a, c, g, or t
  misc_feature (1323)..(1325): n is a, c, g, or t
  misc_feature (1327)..(1328): n is a, c, g, or t
  misc_feature (1331)..(1332): n is a, c, g, or t
  misc_feature (1334)..(1340): n is a, c, g, or t
  misc_feature (1347)..(1354): n is a, c, g, or t
  misc_feature (1356)..(1357): n is a, c, g, or t
  misc_feature (1366)..(1368): n is a, c, g, or t
  misc_feature (1370)..(1374): n is a, c, g, or t
  misc_feature (1376)..(1381): n is a, c, g, or t
  misc_feature (1384)..(1386): n is a, c, g, or t
  misc_feature (1388)..(1430): n is a, c, g, or t
  misc_feature (1432)..(1432): n is a, c, g, or t
cgggcgtggtgcctcccgcactggtggctgccgcggctgctggagcagctgccacggctggcatcgcagtggtcttgttcaacctcaagaggtaatctggtggtccgttgcgcggaagttttgatctgctgctatggcctatatgagaatgggttaaccgttttgttagtgtcactggagtcgtagtagtagtatctttactatcagctggataatagactagatgaacatgtatggcaagtacctttactttctgaagttttcaatggtaataagagtcgtgaacacaaacatgagggataattgagttcttgtctggtcttttgagttgcacctgattccagacttnnnaattaannnnnnaatnnnnnnntgctanngannnnnnnnnnnnnnnnnnngncttggcagatacnnnnncctgtcnnnnnnnnnaggnnnnnnnnnnnnnnnngnnnggtnnnacgagagtcctgnnnnnnnnttannctnnnnnnnaatannnnnnctnnngttnnnnnnnnnnnnntnnngcggnnnnnnnntganannncnncgcnngcnnnnnagctnnnnnnnnnannnnnacnnnnnnnctccttnnnnagtnnngnnnantcnnnnnnnnnnnnnnnnnnncnnnnnnnnnnnntactnnnnnnnnntttcnnnnnnnnngcttacnntnnnnnnnnnccctcnnnnnntnccttanccncccacctctacnnnnnnncnnnntttcttcnnnnnnnnccgnttcgnnnnnnnnnnnnncnnnctctccannnnnnnntnnnncttnncnnttccttcgtcnnnnnnnnnnntnnnnntctctcnnnnnnnnnnnnnntnnnnnnnnnnnnnnnnntcttttntcttnnngtccnctnnntnnnnnnnannctnnnnntcncnnnnnnnannnnnnnnnnannnnnnngtnnttcnnnnnnnnnnnnnnnnnnnnnnnnnnnnngnnnnnnnncncnnnnnnnnctctcnntaannncttttcccctnnnnnnnnnnnnnnnntnnnncnnnnnnnnccnnnnnnnntnctnnnnnnnatccccnnctatnnncnnnnnnnnnnnnnnntcnnnnnnctnnnnacnnnnactatnnnnnnnttanncnnnacantnnntnnnnnnnnactnnnnnnnnnnnnnnnttnnnnnnnnctnntctctcnnnnnnatnctccnntnnnncttcttcannnnttgncnnncnnncnnnntnnnnnnnnnntcaattnnnnnctctactacantnnctcannnnnccnnannnnnnnnnnnnnnnctacannncnnttnntnnnnnnncaccacnnnnnnnntnnccaccaccnnncnnnnntnnnnnngcnnnannnnnnnnnnnnnnnnnnnnnnnnnnnnnnnnnnnnnnnnnnncngct

SEQ ID NO: 6202 - DNA, 191 bp, Zea mays
atgggaggtgcttgaatctgagcaccagcgcctcagcgactggcacacccagctggaggagcgcaccaaggcggcgtcccgccagttcgcctctgagcgatccgaactcgcgcgggaccgcaaggagtacaaaagggacctccaaaaggtgttccccagggagctggaggcgtcccggcgggagaagaagg

SEQ ID NO: 6203 - DNA, 691 bp, Zea mays
  misc_feature (415)..(417): n is a, c, g, or t
  misc_feature (581)..(581): n is a, c, g, or t
  misc_feature (596)..(600): n is a, c, g, or t
  misc_feature (604)..(606): n is a, c, g, or t
  misc_feature (620)..(622): n is a, c, g, or t
  misc_feature (624)..(624): n is a, c, g, or t
  misc_feature (630)..(633): n is a, c, g, or t
  misc_feature (658)..(662): n is a, c, g, or t
  misc_feature (664)..(664): n is a, c, g, or t
  misc_feature (670)..(673): n is a, c, g, or t
  misc_feature (675)..(677): n is a, c, g, or t
  misc_feature (679)..(681): n is a, c, g, or t
  misc_feature (686)..(688): n is a, c, g, or t
tgctggcgccccccctgtggctaatggtaggtgggggagttacactttctcggccgccatcggagggctgttcccgttgctgagcttccaggtgcacggattcccgcaggcgactgcctatgggcctgctgcagggtttccttatggatacggccattctttccatgggtggcatggccatggcttcccgcgccaggcaccacaaggccagcaggtcgatgcgtacttgaaggtgctgctgctggcagttggtgtgcttgtaattgccagcctaatcgcattttagattatgtatggctggcgatgtcgctgatccttgttggtgtgtaccgtagttctagcatcattgcatcttagatggctcccaaagtttgatgtcaatgtgtagagtattgtggatgctttcggctagatnnnctacggtacacaccagcaaggatcagcgacatcgccaacatacataatctaaaatgcgattaggctggcaattacagaacaccaactgccagcagcagcaccttcagtacgcatcgacctgctggcttgtggtgcctggcgcgagaagccatggccatgccacnatggaaagaatggcnnnnnatannnaaacctgcagcagnnntnggcagnnnntgcgggaatcgtgcactggaagctnnnnncnggaacnnnntnnnannncggcnnngaa

SEQ ID NO: 6204 - DNA, 391 bp, Zea mays
  misc_feature (385)..(386): n is a, c, g, or t
ctgctcggctacgccgtgccgcagatcgacgtgatgctggagggcgggcagaacttcacggtgctcggcggcaactccatggtgcaggtgaacgccaacacggcttgcctcggcttcgtccaggcgccggggcaagcgccggcggccgtcatcggtgggttccagctggagaaccacctgctgctgctcgacgtggacaagaagcagctcggattcaccactttcctcaacgcaatcgggctttcctgcagcagcttcaatttcactcttgctagctagtgtgctgcatctgcatgtatacttaactgtaacaacttgtactgccgtgtattacaaataaataaataaataaataataaagtgggaataaattgattggagtgtnncagct

SEQ ID NO: 6205 - DNA, 401 bp, Zea mays
ctttcgcgatgtcgaaccaagttgctcctccaccatcagttcaaatggctgccatgtctcagcagcatcagcaaatcccaacgatgatgcaaccaaatccctttggaccacctatgcatccacaggtgagcatggcccctgcaacaaacaatccctttctggatgctggcttcggggcattcccagcggcgaacaacggccatcagcaacacaacccatttggcagtgcccaacttctgtaggtcacttagtcacaagagcaaatttgtgccccagcagatgcgatttttgtgtgattatatcatgcattgtgctggacctttcttgcatgcgacgcgtgtattatgttatggcttcaccacacggagagctgtgcctatgtcgtgacccaactcttgttg

SEQ ID NO: 6206 - DNA, 405 bp, Zea mays
ttccggcacataaatagcacaacctctaaccgccaattgttttctatactcttttgctaagccgagccatacccgcccgctccttttctcatagtcatccgggaaacattctctctctggcgacgacggccatggtgcagcagcagcagcagcaacagcacagaatctacatcttgcagttcaggaagggcgggccggagcaggaggtgtcatgcaaggtgtcgcagcccaagggcggcggccggcggccggtcatgtactactaccaggaccacggcagcggcggcggcaagaacggcaagaaggtgcaacctagggcgctgggcctgcgacgtttcttgggcatgctcttcctctccttcctctgcgtggggacgctgttcgtggcgcccgtgtccttcctct

SEQ ID NO: 6207 - DNA, 472 bp, Zea mays
tatatatagtaacatgcatttagccttagcgagcaggtttacacatgctgttgaactgctgcagcagctttgtaaccttagagagttaagagtggtcatcagaagtgatgctcacttgtcctctctccgtgttaccgtctcccatgtcctctaatcatatcaacaagagccaggcgctgtaaaaaaaaagtagtagtaggaattggaaccctacacgactcgaaatgattgtgctatctgtttgaggtccttgtaatgcctcttccactgcagacctgcaaaagattcccagctatttattgtattattcaggataataatataaaaacaaaagagttggcttgcatttctgcgaacaatggctttaccgtttgcagttacactgaagaggtagagcctgttcccagctgccgtggcggtgatgaacacatggggcggctccagctcgaactggtagtaagttcttcccgaa

SEQ ID NO: 6208 - DNA, 731 bp, Zea mays
tcaagctgaagatcgcgcgcacaggatcggtcaggtgaatatcaggcgcatggttttgtagccagcagattcctttgcttttttctttgctgcgtcattatcgataatttgttgttccacttataacatgagctccattcatatattccaggtctcgtccgtgaacgtgtattatcttctctcgaacggtactatagatgatcttatgtggtatgtgctgaacttcgcttcgcttcgttcccctacctaaaaaatggcttgacgttgcggtttaggtcatgtatactgagttggtctttttgttgctctggttctgcttcccagggacgttgttcagggcaaacttgagaacctggggcaggttctgtctctctcataccggcatctgagttttgtttttttttctctagttaagaccatgattgtattgctatgagttgagctggattaaggaagcaagaatccttctgttttgtcagatgctggacgggcaggagaagacgctggaggtttcccagagggactgcaggccaagcccctcgaagaagcagaagacactggtcggcttcctcaagcggcccagcgcgtccacgtccgcggaggagggtatgcccagcacttaatgaagcagcctcggatctgaggcgcggtcgtggcttgtgagcgaaccagatcaggtcataggcagccagcagccacaatggtgttcaggctctatcacgttgtaacac

SEQ ID NO: 6209 - DNA, 365 bp, Zea mays
tctctgccaggttttctctcgcagcccgtgctttgcgcctgattttctttgttttcagcatatgaactgtagaggctgttgccagctgatggttatgattcggcacaaactctgtcaaacggtacttgccattagcagtaagtctaatggtcaagcttgcagggcatccaattcgtgtttcgggacgtgggcactttgcttcctttgctcccttcttcttctcccgaaacccctctctcgagcacacaaaagttctcctagtgattatgttctttgacgtcgtccagagcgttgaccttcggacaaagaagcccaccttttccgcatatgcattgtagaactcatacgcatcgctttcaccatcg

SEQ ID NO: 6210 - DNA, 381 bp, Zea mays
aacctcgtcgctgcatttgttggcacaggacacataagtcagattctgatgtgccagccaggcgcttcctcatggtctgtttgcgcatatgatccgtgtgctgcatttgaagacatggctttctatcagggcaagctctacgcccttgctgatgatgaaaacctcctcgtggtcgacatgagccaagaccaaagcactggcgacccacatgtctgtcgaattggacaggtcatcaagggtgatcccgaccatttgtttgatgcttggatgccagatgacactactggcagaaagaagctgtacctagtcgagtcatgtggtgcattgctgatggtacgcaggaaggtatgctgcagaatggtagacgacacagttgttgca

SEQ ID NO: 6211 - DNA, 693 bp, Zea mays
aagctagcattttcgcatattgtacacagtatcaggaggatgaaccagaagcacaagaatgaatcgacaaatcgtaaactgcaaaacgtcctttttaaattcttacaggtctgcaacatattgtgaatgcattaatcagtggtaccaggttttagcatattgaaaaacaaatacaaatttgttttcccctagctcattttgtacacctgtttgtcaggctgaagaagagtcacgagcaaagagagcatttactatcctttgtgatcttcaccgtcggagggtctggtttgatgaacgcacaacaaatgcaatatgtgatgcttgtttccacccttcctctaggtacatgctgcagaacatttaaaaaaaatttctattcacagctcccagcctaaaatgattgtcattacacacaggattatgatagctgctatttcatttcttcttggatatgaaaatgctccacaagaggatgatagcgacgcatcaagcagtgaagatgaagcagatcaaaacccacaaattcttctcagtaaacaggacgtttataaggtgctttaactgtttaattgtgccttaattgcccatttgtcatttttagatatacttggtttgctttgctttattccctctgatgcatcgtttgcattttcttggtatatgaattctaaggcaaatcacaaggggtacgtc

SEQ ID NO: 6212 - DNA, 352 bp, Zea mays
  misc_feature (344)..(344): n is a, c, g, or t
atgctgtcctgtaaacagctttctcactgatatatcatggaactaaccatgttgtcctgtaaagtgtaaacagctttctcaaagcattacaaaaggacattaaagcaccatcatactagatcaccttgccccacacttggatgatcaggctcttgttgaacatgcagagaagtccccgagaaacaacaacctcagtgtttggtggcaagaaccgatgactccaagaaacagggtatgtaaggggtaataaccgcatagccctttccaagagtgcagagaccatgcagttcctgagtatccatgttatatgatacaagtttctggttccagtgctgaataaggangaacaaat

SEQ ID NO: 6213 - DNA, 398 bp, Zea mays
tcgctaagcgtgtttaattatagttatattagttagttagtttactaattgttgcactactctaggagtaataaccctcctcgacgatctacatacattaccccatcgtctcagctgagctcccggccccagatcgatgtgaactctggccggcaacctgctgattgtgttcgatcagacgttcttccatatgggtttgagaggcacaggcaggcatccatgtgcaaagcggcctgccgcctttgattagcttaacccaggaaggttcatctgctgtatgagttgtgtggtgactacctagctatgaccttagcagcttaattattagcccgtctactgtaaaatgtaacatataagcaactggcagaattttaatatgcacttcctttgctctgagg

SEQ ID NO: 6214 - DNA, 505 bp, Zea mays
attgctggtgctgctacaataaggggttttggtcaagagaagcggtttatgaaaaggaatctttatcttcttgactgttttgctcgccctttattttccagccttgctgctattgaatggctctgcctgcgaatggaattgctttcgactttcgtctttgctttttgcatggcaatacttgtgagctttcctcctggcacaatcgaaccaagtatgtttatgttccacatgctgctccagtgctctactatgtttggtcgctttctccaatgccttattctgtgcagtagaaaacctgcatcttcttgtctgttaaaatttattcagcatctaaatggattttcaaatcgataggtatggctggccttgctgtaacatatggacttaatttaaatgctcgcatgtcaagatggatattgagcttctgtaaattagagaacaggataatctctgttgagcgcatttatcaatattgcaggcttcctagtgaagcaccattgattat

SEQ ID NO: 6215 - DNA, 671 bp, Zea mays
tctagctgaaaatgcgacggcctatgttagcttggagccctgcaaccactacgggagaacccctccgtgtactgaagcgctcataaatgcaaaagtgaaggaagttgtcgtggggatgactgacccaaatcctatcgtggcatccaaagggattgagaagctccaaggtgctgggataagtgtgagggtgggtgtggaggaagcgttatgccgcaaactaaacgaggcttatatccatcgtatgctcaccgggaaggcttttgcaactctgaggtaaatatccgactccaatcatcttcctaatctcccaagtttgctaaatcagtgctcacatttgctctgaaggacctgctggtagatgctaaatggacagtttacagcgctatagagtttgaaatatgagttggacggtagatcctataactaattgtggtctggagaactgttgaaagcccatgtgcttcatccattcgagtagtaatgttcattgttgttgtctgcttatcgaaaatgttctctatgggccattttttagtaccatgtgcaatgtttgtgatggtatttacttgttgttatatgaataacagagctacactctcaatgaatggaatcatcacgaaccagattgggaagggagctgatcagtcaggtgggtactactcgcagctgat

SEQ ID NO: 6216 - DNA, 366 bp, Zea mays
gtggcggcgaaacaagagccagcagccaccattgagcctcagcagattgctagtgaggtgaccacttcggaagtggcggtcgtcgttgtcgagcctgagaacaaagaggaggaggaagttgtggagaagaccgtcatcgagaaggagaagccatcagcagtccatgcagaggaaaatattgccaccaacaaggtggcagccgagcccacgacagaattgaagaaagacaccgaggaggagatatagatggagaaggagaagccatcgctaagctaattgactgcatgtcaattggctgatgcctgatgatcaatgtgcaagaaagagatcgaccactaattggcatacatgtttaagtcgggagag

SEQ ID NO: 6217 - DNA, 543 bp, Zea mays
aatctatttgggtcaacctacacatggatttaagacagagcagcagatacccttccaaagtggttcagttgatatcgttactttcaaggggtcaaaactgaaaacgattaaagaagtctggatcggtcttgaatcaggtacgtcccgtttcatgttctctgcaaatacaatgtaatggtagtaatatgttcacttgatgagtgttttctatcctttgtttattaattttacccttgaaggtcaggttcatggagattagatggtttgagcttgaaagtaatacatggaccagttggtcagcctaaagaaataaatggaactccagaacagaagttcagcggtttgcagtacacttttgagaacgtaaatgtgttccttggagatgatggagcttcagtagctgaagcaaggccgacggctatcactgacctctcaggagtcggcctttctgatcttcaacaagggatgttatcctcaagaagcaaagcttcaagcattcaggaagtaagagaggatgggttgagagagtacgccgaccttaaa

SEQ ID NO: 6218 - DNA, 388 bp, Zea mays
cttggacgagcagggtggctcggttgaggagcttgagatgatgagggctggcagtttagatgcatttaggtgatgaagaagattggtttatttctcacgtgtgtatctgttcatagcatcataggagaataagtgagatggccatttgtcaagagccgcacagattgacaagtccttattggtggttacaagccatggtggcttatgtgtatgcatgggttgattagctgaagttggtgttgaaaggaacattttttgcagccatttggtatatccatgcttagtcaatagcggatttggatgggaaggctagagggagatctgtcatgtggtttgttctggatcagatccatgttttggcagcgattgaagagctggtgatatgtgt

SEQ ID NO: 6219 - DNA, 573 bp, Zea mays
tggtggaagtctgttataaagggtgatcctgaagttgatacccaaaaggtggaacctgagaacagtaaactctctgatttggatcctgagactagacaaaccgtggaaaagatgatggtaagacacataatctgacacacaactgagttctgctgtggcttggaactagctaaatcctttatttggtttgtagtttgaccagcgccagaagcagatgggccttccaacaagtgatgaaatgcaaaagcaagaaattctcaagaagttcatgtctgaggtaagttgcttgaaaaagtaatgatcatctttcagttctgatatttgtatgtaggttggcttgccatcctatttcttgcatctgattcattcctttttttcttttttcttttgccgtggcagcacccggagatggacttctctagagcgaaattagattgaggatgtgtttggccgtttgtctgaatgcgttattagtatgaaacattttttgatcagtttgcatgtaatgcgtcagaaatatctggagatagacttctctagagcgaaaatagcttgaggatgtgttcggccagt

SEQ ID NO: 6220 - DNA, 374 bp, Zea mays
cttgcgtgcttgcacaggaggtgcgcacggggaatctatacgacgcgaagaacggcagcttctatgagaaagttatggacggcgatggtgtggagactgatgtgggatccgtggatacggctgaattgccgatctctagtggagtagaagaggcgaacggtaccgatgtcaaactcacggtggatggtgaaatgatcccacccacccaatcagtaatagaatttggggagagggaaggaatcgattcagaagtcgtggcaaatggcggcgtccagctcaagagctaacccgcaactgaaggatgatttgagttatatggtatttagctgttcagttgcttagtgatttagcttgttttatattacaaggacgat

SEQ ID NO: 6221 - DNA, 368 bp, Zea mays
agtagggaccagagaaagcatagcaatggtgcggaagccgatccacgctgacgacgccggcgctaagagcacggaggcgagcaaggagaggaaggggttgtggtcgccggaggaggacgagcggctcttcacccacatcacctaccacggcgtctccacctggagctccgtcgcgcagctagcaggcaagattcagttcttgcaaaccgatcgggactctcggtacctgattctatttcagctatcggacagcacaacgcggtatgattaatctcttcttaaatgctgaatgcacaggcctgcggaggagcggcaagagctgccggctgcggtggctgaactacctgcgcccggacctcaagaaggaa

SEQ ID NO: 6222 - DNA, 401 bp, Zea mays
gagtctcactaacgaaccgagcaagaaaacttatctgatatgtcaatgggagagtagggaactgccttgctaatccaggatttttcactagatatgcaaagtaaaaggccttgtgtgtgtcatcaaaacctggaatactttgcaatgtttgaagcaagtcaggtggtaggtcatctgaactagccttctcaatagccattgcaagcctttcagcaccatctttgaatgctccaatcagccctgcctcttcattactagtaacctttgccttcttcctaggtctaggagctgaggatgaagccccaatatcatctataggactaggaacagcattaacatctccctcatcaatctatgtttcatactagaaaatggaaagaatggtgtggcatcatcaagta

SEQ ID NO: 6223 - DNA, 372 bp, Zea mays
ctggctgattgattgatcctttccatgttatcatttaaatttcttcctatgttgttccaatgatcactactggctgaaataattatgcatgcttgatggacaaaatttgctaacgccatgcatatgtggcagaatttccatgaaaagctgtccatgctctagcaggtttccattagttaagaaacattctatctactcactttattatttgtttcaacacacctctgaaactatcttttggtcaacgcatctcatgggctcattgcctattgactgcatacaggagggaaggaacaccatatggccacataatcctcaaacaggttggagttactgtgtgatgataccttcttggatcactcaaacacctga

SEQ ID NO: 6224 - DNA, 519 bp, Zea mays
cagggaaacttcacttttactcaaaggactgggtttcactcgaagcaccagaatttacttggttgctggtgaagcttttggcaatggaagcatgaatgctctgaaggacgattttcccaatatttattctcattctacgctggcaacagaagaggaacttgcacccttcaaaaaccatcagaatatgcttgctggtcttgattacatcgtggctcttcagagtgatgtctttatttacacttatgatggaaatatggcaaaagctgtacaaggacatcgtcgttttgagaacttcagaaagactgttaatccagacaggtaatacattaaactgttagatgggtctgttatggtcaatttaattttgcgccgaatgaacatctagccttgtggtttgtgttgtagacaagcggtcatccacttcttcgtctatttttttcttcttctgaatatctgattctttgtcctgcaggatgaattttgtgaacctgatagatgaattcgatggagggaagagtg

SEQ ID NO: 6225 - DNA, 575 bp, Zea mays
tgtaaatttgttggtagagctgaagcccttggacgtggattctgggttggagtgcaatatgatgagccacttgggaagcatgacggcatgtatgttgtgtcctaacccatgaaaaacagaaaatgacaggcttttgtgtcgattttggtactagtcattttatgtgatgtaattctaattgctgcttatgtcatattgcttgatcctgtgatgggtaacctgctattttgatgaataaatggcaatacggtagctcgttataacattttcttggatgctgcagggtgaaaggcattcgcttctttgagtgccctcaaggtcatggggcaattgtgaggccagagaaagtaaaggtactacattcccagctctttaccttgtgtatacttacttagagctagtttggaaccctattttcttaagggatttctattttcccaagggaaattagttcattttctcttgggaaaataggaattctttggaaaaatagagttcccaaactagcccttaagagtaagtttttgttagacgttatctctgcagctgattgccgaaatgtagagacgcctagt

SEQ ID NO: 6226 - DNA, 393 bp, Zea mays
agctggaacgccggcggcgcagctcagtggacgctcccatcgaccattcccaggtttggttctccctcatccggtcctcctccatgtctccatggctgaatcactatcgttctcttctcacgcacgtcatgttgtcaaatccatcactggctttagctcccgtgatctgatcaacagcaaaacgaactcactacacactatgccactatggcatggagtttaattatgagacaatgtaaagactagagcgagtccactaatcacgggtggccaaagaaattcacccgaccaggccttcagagtttagtattttactattattcgtcaccaccctgctacatgattacttgtatataaatagagggcacacgacaccatcctgtaggttgtaga

SEQ ID NO: 6227 - DNA, 552 bp, Zea mays
cattgctggatcgttagctgggaagccatccgatggacgcctggtaaatagttacaattgtgacttggaagatctcccaatgatgcttctgcagcaggtgattaaaactgcccacctcctcctttttttttgggtagatctcccaagcattatgcccctttgtaaaaacctttgtccattgccagttccatgcagagtctgcaaaccattttcagtgccacatgcgatcttctcaccaaagaatagtttgataacttgttattttgtgtatctgcaggttgccagccaagtaatccactggctccacgatgaagcggtggtccttgggatgaacgcgacaatagatttcctgtgcctgtacttggaccttgaccaaggtgaaacactaggcctggtggcacacgttgacccggatgacacctacggctgcgtctcatggtacctcactcttgatcatcacccaacggaggaagggaagatgtcagcgggtagtccggagctagaggagcgcaggcttttggggtacctttccccggaattgctttactctac

SEQ ID NO: 6228 - DNA, 1037 bp, Zea mays
  misc_feature (322)..(322): n is a, c, g, or t
tcaattgctcaaccaggtctgagggtgaatccagctcggccaaacgacaagctcccgtacaggggcgcttggctctgggtgggttctgagatgatccacctgatggagctgccgaatcctgatccgttgaccggacgccccgagcacggcggacgtgatcggcatacctgtatagcgattagagatgttctgaagctgaaagaagtttttgatgaagctggtacgcccggatcttcacttcctcctttgttttgccctaattatatgctgctatgtgacatgatctttgttgtgttgatcatatctctgtctcgctcaatcntagaagatcaatcctagaagagctgcttgtaacgtcagtgaagtcataaactctttcaacctgtgggtgtttgtttagaattataatttgtatagattatataatccaacaaattttaaactaatggtgtgtttgtttcccttctagattatataagttggattatgatgaaaatataggagggtaaaatattactgtaactacaaataagttaaaataagctaatattgggtagcttatttataatttcaaagtgatattttaccctaccacctttacaccataatctaacttatataatctagaagggaaacaaacaagacctaaatgttagtttaaaacttgttggattatatgatctgtgtagattataattccaaacaaataccccacgtaagcctttaccatgacatgattctgtattgtggtctggtttctgtttttcatcaggccagattatcattgaagagtaaagactgactgtaaaccagcataactttcttttaccaaccgtatgaagatatggtttgctctatctcgatactaatgaaatagtggtaaatgcagaaatcagctacacgctaagcaaatccgggaggccagcgatctttgcgagagacccagacgggaacgcattggagttcacccaagtgtagcaactggaagactccttacatgctggagcatctcatggatacctagaggtcatagactt

SEQ ID NO: 6229 - DNA, 386 bp, Zea mays
ttttttgctccaagaacaaggagtctctctcctatcccaaaaggccatgcattcgctgtgagcaatggaaattctagagaatttggtttcagcccgaggtcaccagtaagaaagatggatggtttgaggagcccaccacatcccttgcctcttcctccagcttctggtgcatgctcgcctcttcatccagcttctggtgcatgctcgcctcttcatccagcttctggtgcttgctcacctcttcttccaacccacagtttttgctcgcctcttctttcgtctcccagttcctgcccacctcttcctgcatctcccactaactgctcacagtcccagtcacaatggaagaaagggaaattgctagggagtggtacatttggtcaggt

SEQ ID NO: 6230 - DNA, 757 bp, Zea mays
tgttggctttgagacaaaggaactgctctgaacctccctggaatccctattgcaattggattgtatggttattgctactcagggcatggggtgtttccaaacatctactcttctctgaagaagcgcaatcagttcccttcaatcctttttacttggtaattagcttatccataatccatattcttttttcccctgaaatgtagcgctcatatttttttttattatcagcattgggctgtctaccattttatttgctggtgcagcggtgatgggatacaaaatgtttggtgaagccacacagtctcagtttacactgaacttaccagagaatttagtggtttcaaagattgcagtttggaccacggtaattttcgctgtataaaccatttgaaatttcatttctaaaagaagttaagagacctgaacttttggtttgcttagtgcatggaacaatgatatcatggcatatgcctttcatgccacgataaaacttgcctaagctaatcttattaggatcttttgtctaggatattagtcttttttatctgatttgagcagttctcatattttgattatatcatgctgaacaagtctctcaacttctattgcaggtggcaaatccaataaccaaatatcctttcttatatttggctgggtaattctttgtttttcatgatacttgtcaaactttctatgtccttaacgaataatcacatatgcattaaccataaccccactgactatgagtttggaagag

SEQ ID NO: 6231 - DNA, 440 bp, Zea mays
gagtgtactaattattcgttctgtgtttccaggtcttatttctgatgtaccattattttgctggttctgagatatacaatgcaatccgtgtgttcattgcttgctatgtctggatgactggatttgggaatttatcatattactatatcaagaaagattttagtattgcaagatttgctcaggtgcctatgctacctcatcagtattattttgtgctatgttctaattagtttagtctcctgtatttcttgttaccgccttttaagcactagaccaataactatactttccatgcagatgatgtggaggttaaatttctttgtggcattctgttgcattgggcatatataatagagcatgagatcattgtcaaggatcacttggtctgtttaacacatacaatgaggtaccatcaatcatggctattaagattgcttgct

SEQ ID NO: 6232 - DNA, 543 bp, Zea mays
caaattgtgtcggtgtgtgggttgtggatttgatggtatgatgtgttatgcatcatttactatgatatgtatcgagttgtttctttctgacatggtacttgcataaaatttcagagaaatgagccttatgttgatagtagtgctggatcacacttaaatggaagtataaataggccaattcaatcagatgatagcatgtcatcagtgtttgggaggctatcgatttccagaagcccaggtactgaaagcaggaaacatttttcttatgagatctcattgttatctctgcactctaaaactagatatgtttttgtactttttgaaacagccaatgaaattggatcggatactctgtttggatgctcaatgtctggttcaaaagaaagtcctgtttcaacttctgcatcaatgaggggattgtcaaagccacctggaaaaggggacctccggctctcaagatctatttctacacctcttctttctcctagagttagattgaacccaaatttcattgacagacagaagaatcaggcagctactgct

SEQ ID NO: 6233 - DNA, 634 bp, Zea mays
gcaaacagtacatttcacaaggtttataccacctttgtctgacgtatcttgaattgctaaacgtccatttcagttcccagcaataagaagccctcgatgggcaaggctgcaataattggaatatcaattgggggtgttgtccttattcttggccttgttgcagtagcaacatatgctctacgacagaaaaggatagccaaggaggcagtagagcgaactacaaatcctttcggtaatgtgtaccaaagattaaatactaggaagataactgtacttatcctgattcattcttgttaatgctttggtgccacagcatcatggggagctggtgggacagacaacggagatgcaccacaattgaagggtgcaagatactttccattcgaggaactgaaaaaatgcaccaataatttctcagaaactcaggagatagggtctggaggatatgggaaggtaattcagttgccgctttggcctgttcacagctagacacgtgtttgagaaagcatctaacattacattttactctattaaaaggtgtacaaaggaagacttgcaaacgggcaaatagctgcaataaaacgtgcacagcaagggtccatgcaaggtgcagctgaattcaagaatgagatag

SEQ ID NO: 6234 - DNA, 353 bp, Zea mays
catgtcctgcaacttggtcacatgcgtctgaaatgctgccttctttaattttctttcttgcagcctccgatgatgcactatcaccaaagccacagcggtcacggagcaggcagcataggggtttccacagaaaatccatcagccgttcaatgtcatgtgactcccactccaagacgtctgtttcatcttcctcaagagctcacacggtgcgactttcgcttccttgggttgtggacttgacatcatttggttggaatccaacaatcactttacagtaatctgtgttgatgactttatatctagttttgctcagtcgtattattttcggaccacatgtccacattgcttctgct

SEQ ID NO: 6235 - DNA, 345 bp, Zea mays
atttgcaaacctgtctctgaaacacagtgatcccagttcagggcgcgacgctatctctggcctccgcatttaagatccctttgttccagcttttggatccctgagctttgcagaacctgctgcccctttatgccactctttgtggttgttagtagcatcatgagaggagcagcaccggtgaaccgggaatctcatcccacggtgaataaagctggaaaggttaataactgtggatctggtccttagttctttcagaatgtgcacctggcggtcatcgttagcttctgtccattattgatgcttgaccagtcggaggtgtttaggatctgtttgcagattgatgac

SEQ ID NO: 6236 - DNA, 461 bp, Zea mays
tcacttgcatgtgatgcttcatcgaaggaaacgcacactatcccatctcactctgaagcctgtctgttgtcctactcaaaacaatgtgatcacaaagggcccgtactagtaatacttctggagaatgaaaaggtatctactatctctcgttgccgtatcttccgactaaccacaaaagtaattttttttatgtgtttacagatgtcagtgcaagaaatcccccaaaattggacgatactggacctactgaaaaggtcttcaaactatgggatgccattgaggctgaggctgaactgccatgccgtccacaactggaaccaggagctaaaaatgggcgacgtgcttgaactgatcccttcgaccccatgcaaatccagaggtcgcacgagggagctccaccagaagtttgatcaccgtctcgccgtttcccagtcctgacagccttagaacaccgtaccttg

SEQ ID NO: 6237 - DNA, 497 bp, Zea mays
gcgccatggcggcgcactgcaaggtggccaggaggcacatccaggtcgccagagacagagggtcgaggtacgacttgcagacgggcacctgaagcgccgccaccggtgagtgagtagtgagtgattcacctttttcccagggcggatggtcggtcagtactcagtagttgcaatacctgcaagatgtaccagatggagacgcagatggcgtttcccacgaggtagatgcctcccttgacccagtcgctgttgtcgctggtggtggccgagagaagagccgcgccgaggagcgctgggcccttgaagaacgccatggatgctgctcccgcgaggcagatggcggtgccgacgatcttggccacgctcctcgggctcctcatgtccaccttctctagcctgcgagccggatggatggcgtgccggagtggagccgggtaacaatttgggcagcccaaaacaggaaggaaggaagaaagaaacagtcacctacccgatga

SEQ ID NO: 6238 - DNA, 382 bp, Zea mays
ttaccatggaggcaccgccgagaggctccgatgttttcggatcagcagtgcctgtgttgcgtggtgaagacgatatggttcagagagcggtagaagctcctcttacagccaaggaatcagtccaagaattatctgtatcagacagtgaggatagaacacaggacgacaagtgcaaagatgcggagtctttcaaggagattctgtcactgagcgtcgacatcgctgaatcaagtgacttcccggtgccgggcaatgaaggtattgtggttcagaggggaaatggtgaaacaatttctgtccgaaaatcaggccaagattctcattcaacagagattggggatgaaatggagggccacaaaaccgaagaagagataccactgca

SEQ ID NO: 6239 - DNA, 748 bp, Zea mays
atccagaattgtcgcacctactgtccttttttattaaaatcttcagcaaatgtacaagctgttgttgatgcctcggatgcttgtcgaatatgaaaattttgttctctgatgcaggcccttgattcatttaatgctgaaagtgagtttgagcttaccttgtcagctggtgacattgtaattgtccgaaaggtaacatactttttcgcaagcataggtttttaaatcttcttccatgttgttaatacaattttaatgctttttaaatgcatacctgcaccagataaacacactagcacttagcggtcattaacctaggttgcatttttttatgttcatcgacgttgtgggttctgtaaaatgattaatcatttttgccagcagctccattaagcatgtgtatgatcatttggcctgcatttgtcctctcttttctctgaaacacagatctcaagcaatggttgggcagaaggtgaatgcaagggcaaagcaggatggttccctcatgcttatatcgaaaggcaggaacgtgttctagcaagcaaagttccacatatattttaggagtttctggcagtcgcattacacggttttcatttctattgttgggagctggaactgtatccatgttttcacttcctcttagtttccgcgatgtaattactggctgtcatgtgcatagattaaatttacttccctttttttagtctggaaaaggttttggatgtaacatatttttgagagaccaatg

SEQ ID NO: 6240 - DNA, 456 bp, Zea mays
agtttataaaaaattggtttttccagctctgcattgaactgccaaggcaaaaatagcaagaaaagaataggttggagcaagctggtcacaagcctaattttgtcctgtcccccttgaagggttaatggataagttaacaagttaagcgtgtttaacctgaaagtcttcaatgttttattcttctgcatttttgcgccagatttaggaaactaaaggaggaagaatcaaggagaaaagagattccggggcaagcagaacaatcagaacagtcaagttttgaatctagcgtcgtagatggcgcacaaatttctgatgcgtcttctggagacaaaaatgatgaacaggtagtctctatttttgctacttggtatatggtaaatttcagcaggtaaagtctttttgactgatgataggtattaaacaggagcctcatgaaattggaccgatcgtagctaa

SEQ ID NO: 6241 - DNA, 374 bp, Zea mays
attttgctgtgcttgatctgaaccagtgaaaccttgccaatcgtccaacatgttatttgcattcatggtacccgtatttgctggctcccttgaatgtccaatgaaccatgagtccatgtctgtttctttgtgactggcttttgagacctccatcatgtccccagtttgattcaacgaagtgtcctggacttgaccggtggtagtagaatcttgccaatcgtcaaaagaatcatttttttccttaaccatttctgcagtattttgagccttcacattgcccacatgccatacatcaacaggattaatttctgaagaatgttggtgtgagatgctgctcattgtctcttcatctccaactggtcccaccaaattta

SEQ ID NO: 6242 - DNA, 654 bp, Zea mays
  misc_feature (366)..(367): n is a, c, g, or t
  misc_feature (383)..(384): n is a, c, g, or t
  misc_feature (386)..(388): n is a, c, g, or t
  misc_feature (394)..(399): n is a, c, g, or t
  misc_feature (401)..(401): n is a, c, g, or t
  misc_feature (615)..(616): n is a, c, g, or t
atgttcggcctcgcactgttcgggaacgcctccaactcgtcgaggctggagatcatggccaagggcaccgtgcctcttggcaagatgattggcaacttgatacaggacagagatgggtgaggagggtatgtatacctacatttttcacgtgaagatctgatctccattggatctctgattttggtatcgatgattttcactgtatttacgatttgcaaagatggattcacaaaacacagttagcaacagcagttcaggacctcctgtcagatataggaattgctgctgcaacgctacttcagtatggtgattacagaggtgtatagttgcacttgcacactgagggatgtcgtgagaatctaaaanngtttaaaagacactannannnctgtcnnnnnntnccaacaaaatttgcctgcaaaagagaacggaaacattagcagctgttcattatgctttagagtaagttttaattccctaaaacaactggtgatatatctgcagagcatgtctcagtttaagagaaaaacagtgtccacagaatataaaactttcctatagtatgtttcataggagtacaaaacttacctatcctcaaacaagttcgtaatgtannttccaacgattgcatttactggaagaaccgttaatcca

SEQ ID NO: 6243 - DNA, 406 bp, Zea mays
tactgctactactactatatatcctacacgcatgacgatgactgcatgtatgctagctactaccatatatacaagacaaatttttcatcaactttactaattacatgccatttcgaatctgatctgcagacgcaaacaaatcagtcgaattctacgatttcctccaagtgaacgcgaactcgagcgacaccaagtgtggttcgagcattgaggagcaagaggcggagagccgggatgacgatcaagccgaagggcaggtgcagttcatagatttcctggaggttggggcttcccatcgccgccggtgatttttatctatatatttaactagggatgcatccaaagcaggttgtaatgctttgtgaaagaggcaggcatgctgcaaatagcaatcgtcgtctaacac

SEQ ID NO: 6244 - DNA, 1585 bp, Zea mays
  misc_feature (1575)..(1575): n is a, c, g, or t
agtcgtctcaatcaaacaccatcaaacagaaagttgcagaaattgctgctcagttggaacagtaagattagcttcatttgccttatagtaattatatcgtactttgaccccatatgtaagttgtttagggcatcaacagtctccagcatgataatttgactttttttgggaaaaaatatattattttgaaagagagaaaggtatactatgaaagtatttttcatgatgaacctagtaacgtcatgggttatcaatctatgtaactttttacaaattgatgggtaaagttaaaaagtttgaccaactagaatcctaatgcagcctatatctggaattggagggattgatatattcttttgtttgttttggtgttctttacttacatgtgatcagcaatttcatgcacctgagtgtgaactgggtattatacctcctagtagtattactgttattaatattttttatctctatcttacttgctctttttttatggtgaccagcaattttgttgtctttgcttacatgtcaccctgtttaatttgttgaaatatactcaacactgtaatctgtcaacttgatatgtttggaaaactgtgctatctctctgcttttgccattgcatccctgaaagtgcaaattatccttaatggagtatatttatatattcaagaatttgattcggatagtgggttgcagtataatgtgttcttacatctgagcaacagaatttcttttaacattatctcagtaattttgaaaatggaattcatttgcctttaatttctgtatttcatgaatgacgtactttgcctcaaaatttgtttatgtaaaatcacaaatcctgaagcaagtctggttgctagtggattgcggtggcctgcagatcagcactggctatatgctcttaagttatgaagcttattgatctgcctattatcatgctttgattaatttgctttgtttttgttcttctctatttctctattttctgttcaaattggcatatttacactatcaaacgtgttttttctttgtttaaggtggtagcatggcagctatctggttgttttcatcatctttgtttatgttgttcatgcatacttcatcatagtagtttcagggttacaacctctagtttatgcaaattttaatacttttaggtacccaaaagcaactgagatatttgaagcgatcgctcgtcagtcaatcaacaacaatcttcttaagtatagtgtcagaggaattcttcctaatgctggcatctgtcaactatgtagaggtgatcctattgccatcacaaattcattggagcgataccaggtgtgtattattctgccataagatcctaaccggttaatatgtgcctctttgtctttataaagatgttttgttattattttgcaggaaattgacccgactttctctgggacacgtgaatacaagcttttagctgtatgaataattatttgccctttttccttggcacttttcattgcatgcctgactaaaatcaatcacccagtcatgagctattttcatttcaggatcttgctgcatctatggatgaaggggatncccaaatcac

SEQ ID NO: 6245 - DNA, 453 bp, Zea mays
ttgggtctgttcattctgctttcaacgcaaccagttccctcaacactactcttcgatctcagaaaataatctccctgcggaactctttcctcagtacaccaccgtcgagtacatatcttcaactgaaactggtcctatagttccaccggttttcatttttgttgtagatacttgcatgattgaagaagaaattggttatttgaagtctgcactggcacaagctgttgagctattgccagataattctcttgttggattcattacgttcgggacgtatgtgcaggtaaaagcccattgttttctttctaatgctccatataattgttctttttgatatgaaattggttagtttagtagcatgtaccatctgcatgttcaggttcatgaattgggttttggcttattgccaaaatcatatgtattcaaaggaacaaaggaggtcaccaaggagca

SEQ ID NO: 6246 - DNA, 370 bp, Zea mays
ttatatttacgttaaaggaacaaatagcagttcactagatacacttatttgttttttttaaggaatgtaacagttcatgagttccttttaaatgatctggtttcaggggcacaagcagtggttggctgaagtccagttcctgggtgttcttgagcacccgaacctcgtaaagctgataggctactgcgccgtggattcagaagccagcaagcacaggctgctggtctacgagttcatgcccaacaagagcttggacgaccacctgttcaaccgagctcaccctccgctttcatggagactgaggctgcagatcatgctgggcgctgcgcggggcctggattacctccatgaaggagtgccagaagttcag

SEQ ID NO: 6247 - DNA, 384 bp, Zea mays
tcgtgaattctttgtgacagtgggatgagacatttaagcaagttcttcaatgagcagtatttggctgatcatggattgacaccaacagctactggtctggaatttcttgataaatgagcatttcacagggacttttcaatttcaggaagttggcatcctccctgtgactgcgatgataccttgacacaagggtgaacgctgaataggtcaaagcatgaatatatgccatacaaatggtgaacctgatgtgttttaagtactaattgtagtctagtataggcattgccattggataggattgggatagccagtgttttgatccttgttttgatatatatctattgaggctcaggctgttaccagttagaatgctgcactgagcaa

SEQ ID NO: 6248 - DNA, 631 bp, Zea mays
tttttgattcgtcctcccgccgatccgctgcggctgcggccgctccacggtgaggcggcgtacggccgcggttttgcttcctgcggcacacggccggcgcctgggtgaaaagtgaaaacggacgtgtcgtcagttttccgccggatctggaatgacctcgtgatagcggcgactgttaataccaaaagggcgcaagtttgttacggaaagggaatcggtttcccgttctggtcggttctatccctagtgacgtgatgcccagcccacccctcgtcgcggctcgcgctcacgagacagtgttccaggggtgacgttcgccaacgccaagccgattcaaaacgcacccccggcccggaaagaaacggcgccgctgcgcttttcacatgatgacgatggaggcatggacggacggaacggaaggcaagaaggctttccccggcgccacgcatgccatgccaacacattgatcggcggcgcggcgcatccagggcatttggcagtacggcggcgacgccgggcggtccactggtccattcagccgacgatagtttcgtcccacgggcttaatccgatggcgacgcgcgcggcgtgtggaaccctgttaattcggccattccactattattgctag

SEQ ID NO: 6249 - DNA, 391 bp, Zea mays
ggagtggtgaggagatggatttggagaagccggattttggcaaagaagacgaattgcttgggcttcctaagggctgggctagtgaccattcaaaagaagagtctactgccactgatgcgaaaggtgaaaaagggaagatctctctcaaagacaaggtggagcttgagaaagagatggaagagtactacaagttagactacgaggacactattggagatatcaagactcggttcaagtataaacaagttaagcccaatagttttggtctgagtacctatgatatattggcatcagatgacaaggatttgaaccagtatgtttccgttaagaagctagctccttacagagaggatgaatggaaggttacacatcataagaagcagagcaagga

SEQ ID NO: 6250 - DNA, 368 bp, Zea mays
tgtgccgacaacgtcagaggtaccaaattcaggtacaaaaatgcttcatgtgtgttcagctatacaaaattcccagttatcagcacttggaaccttgttcggcacaaagagaacctacctcggaagaaacgaactgtcggactgtattctgtgtaccaatgaaaaccacctatgctttcatcatttcatcctcgaattggaatgagctttggtaccaagaccaataccctagtccttttaccatttgtattgtagccatgctacgcaagtcgctaacttgaagaatcagcagacattttccaaggtaataaatcgcctataccactgccacaaaaatgaacagcagtaaacggcagaggaacacaaga

SEQ ID NO: 6251 - DNA, 376 bp, Zea mays
gagcgggatccgaaacgtcggcctaccatgggaaatgtccttgagatgctaagtagctagagtgacaggcaccgatttgaggtgttctcggttaggagtggattgaagcggattagagataatcaaatctcttgctagtcaaaactgaatagaaatgggtttactttccctcaatcccctcctacctatgcaaccaaacaaggccttatgggtttcaacaatttggtttgatgtattgtcacaaattgatcatttgtaacattcaagatttatgcgcaaatgtattggcgtgtggattagagagtttctatcttataggctggctcttgaatgatatggcaaacataagctagcaaaccagttcaactactgaggg

SEQ ID NO: 6252 - DNA, 461 bp, Zea mays
gacgacaatgattcaagcatcttcggttacatagagacgccactccctgaaggaacgaattacacgcaagaacaggcgaacagctaaggatctgaacaattctccacgtcttgagttcaaaaaaaatttcagcagagtgttgaaggaacaaagctgttcgatctagcagtagcagtgacggtcagatggttcagtagatgtgcatttagtcgtcgtccacttcatgaaaaggcagtggaaccgtcttcaccgcacggaacttgccagcgttgttcagatgctcattctccagcctgaaattttcagtgcttggttcagtctctggctcgatgggtttgctgttcaagaacgggaccgtgcagagctgtagtattaattataggggttttttttacctatagaagttccaatgccctcgccggatcacctcgagggccgctaggaagaaggaagtgacccta

SEQ ID NO: 6253 - DNA, 380 bp, Zea mays
ctactcggctttccgaaggatcacacgagaggtatcagcaggacagagaggtatcgatctctaggaaattcatttcaggtcgatactgttgcttaccatctctcagttctgaaggatctgttcccacaaggcatgaatgtgctgtctttattctctggtattggaggagcagaggtggctctccacaggcttggcatacggatgaacacggttatttcagtggagaagtccgaggtcaaccggacgattctgaagagttggtgggatcagacgcagacgggtactctgattgagatcactgatgtgcagacactgtcatctgagaggatcgaggcgtatattagaagaattgggggcttcgatcttgtgattggtggaag

SEQ ID NO: 6254 - DNA, 579 bp, Zea mays
gatcaggctcggagacgaataccctccaaaggctgtagccaaggtaaatatatcatattaccaagttaaggaactagacttattcccatgtaaacctgaaagtagagtttcacaacataacacttaactgatcctgctccgaaaagcactgcagaagttttgataatatgtggcttggatggacaaaagatcaccacaaatctagcatttaaactgtgttttgtttttgtgcaccagatggctgctgtggccgccctctgcgtgcaatacgagggtgaattccgtcccaacatgagcatcgtcgtcaaggctctgaaccccttgctgcacagccggtctggcaaccgccctactgcctcgtcggcctcccacgctgccgcagcagcagagcgatccggactgtgatttcccatcgctgcgacaactttgggttcacgaaaaaggaccgtcttgtggagcgttggtgttgctgtgtcgtgactgccaacgccttggcgcagagaagagctttgccatgcagctgtgtattgtaaattgttttgtaagcgatgcgcctcctggtttgtgtgccctgtcatc

SEQ ID NO: 6255 - DNA, 380 bp, Zea mays
gaggcgtccaacctcgctagaccggtctttcggaacaagccgtagcgaccatcttcgatgattgggtcaactgcacgtgctgggtcataccttgtttggtgtgttaaagatgggccggcaacaggaggaagctcccaatatatatccagcacagattccacgagcctgctgttctgaaaatgctctttgtatgagatggccatattgctatggttgaaattgtccctcatgtaacctttaacaccccaccatgcatcatcctttccgcatagatcagctatctccacagccttctcccagaacttcttccgttcgaatcttagtcttgcctcatcgctctcccaaaagcagctatgtccaccacctctgatgtatgattg

SEQ ID NO: 6256 - DNA, 804 bp, Zea mays
  misc_feature (793)..(793): n is a, c, g, or t
  misc_feature (795)..(797): n is a, c, g, or t
aatacacaatatctctaaacattgaattgagcaacatccttttgtgttcaatccagtgttgtcataaaaggctgtgtagtccgtacatgccgtttaaacactacacactgactagctatgtccatttgattggctgtttatcccgtttatttgaccatgtagcctgaataaatgttaaatgataggcgcccatctgtttaccatttagcgttcttgtgaacattggctcaatgataatcttatgctatgttgatgctatgtattttacaaattctcttggaatcatgaatgttttactggtgtatatctttggttatatgtatgtttgctcttgttgagtaggagctatgtcttttttgttttgttgctggaggttatgaaaacataaaactgtctattgctcttacacaagatctaacattgatcccagggccccagctcaggagagcaaccttcgtcgactacagtctctgcagcaagtgatgtgaagactggggctgggccaacagagtcagcgtctgcaaacgtgtctaccgacaagaacaggaactacgctgtcctggcaggcacaattgctgctctgagtggcctgggttggtatctattgtcaaagcctaagaagtcggaggaggttgtggactgaagagggggttacgaatgcgagctgtggatggttggccttatatttcaccatggtttactttctgcgcacaccttctggaaataattgttgaaacatacgctgcagtctgcattacttgttctgaggcctgttgcaacaccgaacattgangnnngtactcg

SEQ ID NO: 6257 - DNA, 381 bp, Zea mays
ggagcaaagagcatcttctctgcagttcacttctccttacttctaattctagaccacgcaatatactatgcgctttttacagggtgggaaaggttggagaatatactactgtactacatagtgtgcaatctatgttatatgtatagaagacgtgccacttctctgagctggcaatgccattcaaggaactcttgtgctcttttgcctcttctcttctagctgtgatgcctcgttcagcatgtccacggcgtcactctgcatgtttagcttggatagtgcaactgcctgcatgtagaatgctgttggccaatcagggtagacgatctgcgcttgcattgcatcacggagggccgcatcaggttggtcacacataaggtagca

SEQ ID NO: 6258 - DNA, 381 bp, Zea mays
  misc_feature (369)..(376): n is a, c, g, or t
tgatgaggcctgtttgtttttgtgaacgggtgttttatgatgggcattgttgcttgcctgtaagcaggggaaaagatatgtaactttgtattcatgtagcctgtacccgctatggtcactacgtactgggatagcttaaggctaagttcttaacacagtttataaccatgcatgtgatcgatctatcagagattgaatagctcgaatatggtattgctgacatgttgcacccccaaagtcatcgaacttctttgttgaatttgggatggacagtggatatcacaaaaaatatacatccagttcatccaaagtgcaggtaactgttttattcagacatatatgattaatcatcattcatcaatatgtgannnnnnnnttgag

SEQ ID NO: 6259 - DNA, 380 bp, Zea mays
cgctgcttctaatcacgatcgcagtcctggttgccgccattattgttacatggatttggtccgagaaaaaggagttgagagacaagtggaggtgagcgaggtctcagtgttctgacgctgaggaaattttgggccctagtcagctaccttctcctccccccttttcattgtagtgctagagttcgtttcacttttgactaggactttatttatgtaaccgtttgacaacaaagcctatctgccgtgaattgacacactgcggaggccttatagaaagccacatacgcaattaaagattcaggaaatgacatcgaagggttagcagagtgcagatggcgtgaatgggggttgcctataacgtgtaatctgtaccactgcag

SEQ ID NO: 6260 - DNA, 897 bp, Zea mays
  misc_feature (29)..(31): n is a, c, g, or t
aggttattctcacccttgtatagaccctnnnaggtacctccaggggctttcattctgatcgtttgctagaatagcttcaattgtgtagtctacttctgaatcacgcattgccgcaaggccaccaagaaatggtgatcttgttataacaaagtatctctgttggagaaaaagttaaagatacttcagtgcaagcttaatagctgatccctatcagtcagcagaaaaaaaaacacttaggaagcagcacaggacacagcaggatgtaacaggcaatatgaatgtcaagaatagtcatacaatcaactttgcccagctttgacagatatgtactacctatgttggttacatagacatgatcttatatacatttttttacaaataacagagaaaatgtttacataggcgattgtaatttctataatgccgtagactttaaaatacaggaagtaaatcagaatgcatacagttatccatactaattgtatgaaattaacatgggatgatctgcaaactaaaataatgaagcaatgcaagttaaaatgcataaaaactggaaaattttctcaaacatgatgggaaaacaagaaaattttaaggcgcaaataatagagcatgacctgattccaagctgaattattgaagacgtcttccttaagtaagtggtcacagtattctaattcagtctcccatccccccaacgcttgaagaacccactataacaattgaattaagcaatcccgttagtagaagaaagattttactgatactcagtttagcttagtacccaaatttggaaacttagaatacagaaaatgggtacgcatacctgcctatgagaccaagcatgataattttttgcatcaatagcaagtatcttcattgtgaattcatgctctt

SEQ ID NO: 6261 - DNA, 365 bp, Zea mays
actgctctgctgctactatcctagtcctagtatactagtatattatacagtcctctctgtgaaatttgaatcgactcgaaaaccaaaccccaccaatatgagcttgttaatatttgtcctcccgaatcaaccagcgcttgttaataatggctgatgatgcatgcttctactatcctgcctgcactctgcaatcactttgaacttgaattttcatgtgtagtgtagtgagtagtgcagatttgtatatagatgtggcttgttgctgcttgctgcgtagtaagtaaagtaatccattcactgggaatgatcttccgatggtgttcatgaaaatagcaccatctgtactttctatccagcggtgctta

SEQ ID NO: 6262 - DNA, 374 bp, Zea mays
agtatccaaccaagttaatcactataacccttttattgcctatggatcgctagacgagacatgggaacccaatctctctctcgctactactgtggatgccgcttctatagcacccatctgtcctgtcgaaaagacagatagttttagtgatcttgtcaacaggccactggaaggatttgatcctattgaactagacgaagctataattgaagagaacaggtcagattcagttgaagaaagctcgagcacattggacgtccaagcatctgaacaacgcgatgatcagagagagagtctcactaataatgacgtgaaaactgatgcagcacatgaaacgggcactgctatatctctatccaccagcaatggagaga

SEQ ID NO: 6263 - DNA, 769 bp, Zea mays
atgagggctgctttcgagaaatggtttgtgaagtacaaggttgacttggtgtttgcagggcacgttcatgcttatgagagatcagtaagttcttcccttcagcgaagtctccttccatttgtatttttttcttcttcttcacatggtagaaaagttctgagtttagtctgggctgtgaatctgttccttcagagttgaatcagatatctggatgtagttgtatttctcatcgatgtcctacacttgcagtaccgcatttctaatgtcaactacaacataacgtcgggaaatcggtatccagtgccggacaaatctgctcccgtttacataacggtcggtgatggaggcaaccaggaaggacttgcttcaaggtgagaggaactaatagccagcaaaatgttttactggtgctattatgtttactgaactcatactcatacactcacgtggcctactagacagaaacttatggttgaggtcaggtcatggtttcaacttccaagtctcgtctcaacttagcatcagagatagatagtttccccttcgcattattgtcttcattcttttcccgaagtcttacagcatttgcgctcctttgcctgttgggctaacccaccatcttgcaggttttataacccccagccggattactcagcgttcagggaggccagctatggtcactcagttttacagctgaaaaacaggacccatgctatctaccagtggaatagaaacgatgatgggaatcctgttccagcagacaccgtaa

SEQ ID NO: 6264 - DNA, 404 bp, Zea mays
agaaggtcacgcactgacagattgttagaaacattatctaatgtgatagtaaacatcttctcttttatcccccactctttgagacactctgtaattccttctttgattgctaggcctgtatgtggatatttcaaatatttgaacgcaataatcttttttttcaagataaagtctgcattaatgtagtgggctgtcaagcaaagataacccaacttctgatttgaggtccaaagattagttgtcaagcaaatccgagagttaagactttgtagctcatttcttagctcttgcctcatcatcttgaatctggtaatacaatcattttgcattgtttgacgcccaacaccgctgaatgatggctgcattgactccatccactgagcaaagaaaggatgtcaaacttg

SEQ ID NO: 6265 - DNA, 1094 bp, Zea mays
  misc_feature (1031)..(1036): n is a, c, g, or t
gggagtgcctcagctggtacaagttctacagctgctcctcctgagaaatgtacaattgagattgctccatctgcccgtacttcatgtagacgatgcagtgaaaagattacaaaaggatcggtaagtatattttgattaatattttttatgtcatcacttttttttgtgaatgttcattgttattaagtattttttgattaataaattgtttttttgttgctagatgtcattaagtatttctttatagtatgttcataaacaaactctcctctttaggctttagtgagcagtcttaagtgtaatttatatgtaggcaggaatgataccaattggatttttaatcgaaagcaattgcattgaatttacattcttacgtgtgtatgtgtatatatataactactcccatgtgtatatcacacacacacacatgctattcgttaccctatgtgaagcttcacccagccggagccggtaattaccgagcgatattcagtaattatcggtaatgactgagcgatattcagttattattagaaattactgagtgttcttcaataattaccggctgggtgaagcttcacctaggatgccgaatagcgctatatatatttatttggtggtggtagtgggtatcataatttttaaacttcgatccatgcaatattggttctcaactctcaataattgcatatttaatatttaattccattaatgctgagaaagtatgctgtaaaacattgccttttgacttgactcaatttttgtcaataacagttttatatgcttgactaggtccgtctttcagctaagcttgagagtgaaggtcccaagggtataccatggtatcatgccaactgtttctttgaggtatccccgtctgcaactgttgagaagttctcaggctgggatactttgtccgatgaggataagagaaccatgctcgatcttgttaaaaaagatgttggcaacaatggtaagaaaatcatggaaataagataaccccacttaactttttttactcagtaatcttnnnnnnttttttttgctcatcaagaacaaaataagggttccaagcgcaagaaaaggaaaagata

SEQ ID NO: 6266 - DNA, 450 bp, Zea mays
tgctgtgtacttccaggtgaactttctagttgatatcatcaacaacatttcttttcgtttgagttgcagtgttctaaacaaaaatttaacttgctgtagctaaaatcgagattctgggataaggaccctgggcgtaaccgtgttccttatttcctctgtggatcattatcagaggatggagaaaatattaagattggcagcaggctgcaaacgtctccattaccaaatgtgcctgtggggaccaaaaagggttcaaaaccatcccaaagtatagttcaggcgcttgctacaagcgatgtcactagcctgctgacatatcagctcaactcccccagaggaaacaatgatgccgtaaatctagaagctcatgatgatcaaggtgatggacgcagcaaagagcaaggagcaggtgctgtaaatcaagaacttgatggtgaacaagatgatgga

SEQ ID NO: 6267 - DNA, 411 bp, Zea mays
tttttgtttcctttttgaatgatgtttttaaggttctatgttgtgattgaacataaagtaatttttattgttgttttcagggatgcaaaaattttactttctgccacatatgaggatgtctctgtggagaaacttaatttggacaagatcaccatatatgttgaacatccagaaccatatgatccacctgctgagcctgcaccaccgccgccccagccactgaagttgactaagaaggagcagaagaagttgagaacacaaaggcgtcttgctaaggaaaaagataggcaagaaatgattaggcaaggcctcttggagccacctaagcccaaggtcaaaatgagcaatcttatgaaagtgctaggctctgaagctgtccaagatcccacacggatggagatggaaataaga

SEQ ID NO: 6268 - DNA, 291 bp, Zea mays
gtcctcttctttttcattaaagttatacatgaacactcccataatcccctctgctacattttatctatgtaataagttatttattgtttacagtgctgcatgcattaatcttgaagaataccaaactgcaaaggctgctcttgagttaggttcttcctatgcaccaggcgattcaaggtttacccgtctattgaaggaatgtgatgagcgcattgctggtgagcaaaattaacttcagaagttagtatataatacaacagtatgtgtgggggtatgtggtgtgtgtgtgga

SEQ ID NO: 6269 - DNA, 474 bp, Zea mays
tatttacacacattgtccacgattgcagcactcactcatttgttggttgctaatttgctgttgctgcatgcagtggatcttctgggtgggcccgttcatcggcgcggcgatcgcagcgctataccaccagatcgtcctccgcgccagcgccagggggtacggctccttccggagcaacgcctaggaccatctccttccgggctattcagctcttcctcctccgcagtttaaggtgaacggagaaggagagcgcgagggggtacggctccttccggagcaacgcctaggctcacctcgcctttgcccccgcccatccacagcagcagtagctttcattcaggtcaagagtgttgcagctgccggcaacggtagctagcgcaggcgtttgtgagtttgtgtgcggtgtggaaagcaagtgtgacttggtcagcgtctgtgtgtcctgttgggttgcagtcaatctaactaaaaaaa

SEQ ID NO: 6270 - DNA, 383 bp, Zea mays
gcctcggccgtcttcctggacgagatgaggccgagggagttcacgtcctggttgtgctgctccgcgctctggacgtggttggtcacggggttggccaggaactggagctcggagcagtaggaggccatggcgatctcggcgcccttgaagccgtagtccaggctcgggttgcgccctccggacaggttggacggcaggccattgttgtagaagtcgttcacgagctccgagaactgcgcgaacatgagcttgccgatcgccgcgacggcgagcctggtgttgtccatggacacgccgatgggcgtgccctggaagttgccgccgtggagcgccttgccacgggacacgtcgatgagcgggttgtcgttgacggagttgatctc

SEQ ID NO: 6271 - DNA, 371 bp, Zea mays
tctcatgcggaggccttccgtgccttcttggaggcaggggacttcacggtcttcggcttggccttggccttggcggcgggggacttcttcggcttcgccacgaccttcttctcgggcactttgcgcttggtcccagcagcagcggccttctttggcttggcagccgctgccttctttgacttggcggcggcggccttggccggcttgggggcggtggtcttggcagcggcggcctttgccggcttagccttggtcttgggggatgccttcttggcggcgtccgagagcttgtacgaagccttgaccttcacgagcttgcccttggctgcggacccacggagctggatggaaagcatcttcttggaagttgg

SEQ ID NO: 6272 - DNA, 504 bp, Zea mays
ttggtgccaccaaacatgcgctccatgcaagggaagcttgatattgtgaagctttgcagccagataaagggaaccagcagctatgtactggggtttatactgtagacacaatgttgttttaagcctgaatataagtagcagaattaatacatccgatttgcaatattaaaaatattggcattgataaatattgaaatagcttatcatataccagtcattcacaaagttccatgctacttgtttcacttctttttgattgatgccaagattttgcatggcatcaagaagtggtctataaggatgctgaatgttgaaatcaaatcgaatagttgtaagaagcaatctctctccgatcaaaatgagcgctttctgcttctcaaaaacatcctgtataatatatgctgatcaaacactggatgggcaacaacataaaagtttgaaacattaatttagtggtaccttctgacggatcctttgagccgcagcagggtcccgcctatactg

SEQ ID NO: 6273 - DNA, 948 bp, Zea mays
  misc_feature (895)..(895): n is a, c, g, or t
  misc_feature (897)..(898): n is a, c, g, or t
  misc_feature (910)..(911): n is a, c, g, or t
  misc_feature (920)..(921): n is a, c, g, or t
  misc_feature (928)..(930): n is a, c, g, or t
  misc_feature (939)..(941): n is a, c, g, or t
cgagcagctgagtttcgtttcaatggggctacgagatgccagttgatgtgttagcaaaatggtattcagccttttcttgttcaggctcccaatttgttaatggtgctttgtgcatataactaagcagtaccaagctatatacattacttacctgatttttatgtttcaggattgctgacaaagctcaagtttacacgcagcatgcatacatgagaccccttggagtaggttagtatcatcacacaataaagtttggcattccattaagcttctgtcattttactgtgatgtagtgttgagttagcctatggcttattgccaccatgttcttcttcggtatcattcttcagttgctatggtcttgggctacgatgaagagaaaaatgcccaactattcaagtgcgaccctgctggtcacttctttggacataaggtatatgcctattttgttctgctccacatgccacctctacccttgatgaatttctgctgaatctctagtttctttgtctctgctgaataatcctatttgttgagaattaaataatttatggatattttttcaggcaactagtgccgggctcaaggagcaggaagcaataaattttctggagaagaaaatgaaggatgacccgaaattcacctatgacgaaactgtgcaggtaatggtgcatgtcttttgcttcaaccaggcacaaggctcgacttgtttacaatgttacaccgctgcaccaggctagtaagcgaaaaatatgttgtcaatatggttagttgttcattggctttgttgcatattaagctgttaatgcagctaagtaatgtaactgtgccatagtttctgcagctacattcacttctctattcgcaaaaacacatagaagtcgtggtattactnannaacttctgcccnntgttttcanngattgcnnntatctgcgnnngcaatca

SEQ ID NO: 6274 - DNA, 711 bp, Zea mays
ttttggtccaagtcaacactagtggagaagaatgtaagtactctcatttcctttcttaagactagtgtgaacttggtctttagtcttggatatgcatttggaagctgtaggctgatccgcgagcatgctgggaggtcatgtatgtatgtagttctgaatactatttttttttcttgcagcgaaatttggagtagatccctcaggatgcatggaactagcaaagcatgtcaaactgaactgcccgaaccttgtgttctctggtctgatgacaattgggatgcttgattactcctcaacccctgagaatttcaaggtaaaaatatagtatattctgggatgcagaaattgtgtacgagtggcaatatggcatgcatatgtgcgcttatgtctgttaaattcataggcgctggctaactgccgggaagaggtgtgcaaggagcttggaatacccgaagagcagtgcgaattgtctatgggcatgtcggctgattttgaacaagcggtaagagaaatactgtgatccgtgagtgaagaaacatggtaggctgatagctgcattaataccaatatatgtttgtgcctgcagattgaaatgggaagcacaaatgtaagagttgggtcaaccatatttggtgcaagagaatacccaaagaagaactagggtgtttaactatatttggtgcccaaagaactagggtgcttatgcattcc

SEQ ID NO: 6275 - DNA, 398 bp, Zea mays
  misc_feature (389)..(390): n is a, c, g, or t
actcgtccaccatctccccgaactcggcaggcgtcatcgccggcgctgagtccccctcaccgtccgccgcctcctcctggacgtacttcttgcccagaactatgcgcgagatcacgccgagcgtcaacatctgcaggtagtccctgagccgcacggtgcgcccagccgcttggcgcagctgtcgcagcatcacgcgcacctcctcgtcgcggatgtgctcgaaggactcgagccgcgtggcgctgaagagctcggtggcgcagatcctgcgtgcctggcgcaggcacggcccggaaggagcccatagaaggtcggagaagtcgtacgcgatgtacttgccgactgcgaacctcggccggtcggagaacgccgcgtcattggtcttgagnnaagagctt

SEQ ID NO: 6276 - DNA, 678 bp, Zea mays
gtgcttgagcaggtactcaaacactgtgtcttactggcccactttttttacttatgctattatcaaacattacaaatatccctacactatcatgcttgcaacaaatataaatatgacactaatacgagtttctgttgaaataatcagtatgtgagatttgtcaagcctgcatttgatgcttttgtcctgccttcgaagaaatatgctgatgtgatcataccaagagggggagataaccttgttgcaattgatctaattgtgcaacatatcaacacaaaacttggccagcataacttgtgcaaagcctacccaaatgtctttgtagttcacacaactttccaggtaccttcaacactaagctttacattacaatgaccttagatttgcacactcctgatttttttgattgattcatctgaacagataagaggaatgcatactctaattcgtgacaagaacattactacacctgactttgttttctactcagataggctgattcgtctggtaccactcttagttcttctgacctccaataacttattagaaccttaccagtttgagagctgttaattgtggtttacttataccaatgcatttgttgtacataaaatgtcttccaggtggttgagcatggtcttgggcatttgccatttacagagaagcaggtggttacac

SEQ ID NO: 6277 - DNA, 658 bp, Zea mays
tgaggtatatgatctgagagcaaaaaaggatcctccattttgcaaggaagagcagaacaaagctagtgcatggtgagttggatcatgtatacttgggctacatcactatgctaggtccacgattactccaatgttttcccagataattcacttttggttcatacaccaataggttgaccttgcctttttaggtatactaatatcaaacattgcctgcacaaagcacctgttggtatcgaagaaagaggcagtgactggcctgaggagtggcccaagaggctcgagagtttccctgagtggcttggggaaacagaaacaagggtggcttctgatcataaccattggaaggctgttgttgagaaatcttatctggatggattgggcattgactggtcaaatatccgtaacataatggatatgagggctgtatatggagggtataataaatctcattttctaattctgaatactaaataggatttctctcaaaaaccggcattgtactttataatacatgtttttaaaatgttaaagtaaatgtattgaaacagatgatgattgttttcttgcagatttgcagctgcactggcatctaaaaaggtttgggtcatgaatgttgttcctgtgcatgctgcagacaccctacccataatctacg

SEQ ID NO: 6278 - DNA, 359 bp, Zea mays
cagagtcctcttctgtagagccctttgtccatcctcatttcccagaactaaaaatcccaaaccttttaggcgagtcggtattaccaggattaccatccaacttcctctgctcagatgatccagatttctgagtactactgaagatcccaaaactcttgcttgctcgattaggatcaccgccacctgctggttgcctttggttgttatttagtggaaaagaacttctcctttcgttccttggatcttgttgtgataatccaccttggttgaacctcggtaacggctggttatgctgctgttcaagaggtctctggttctcataacgacctccattttcattccttctatcaccttgaggg

SEQ ID NO: 6279 - DNA, 370 bp, Zea mays
ctggctcaaggcacgcgccaccgctacagccgcgggcgcgcaccacggcgagcagtagtttgggcacgcctcctgcgtgcgtgcgtgccatggccaggcttgccttcaacttcaaccgcgcgtggtccattcaccatcccagattctatcctaggttccttccagctactacggagtattcgagtacggatccagcaataaacttgtgctgtctgctgattacagaatttgtttttgctccaatactacgagatctcgtctgatggtcccgatccgccatctgcaaccgctccagatgcctccatgcctgccgatgatgaatcttgcaactttcattcattaattaacgaatcagatatattatttctgc

SEQ ID NO: 6280 - DNA, 421 bp, Zea mays
ggcatcgtagaagagaatggttctcccttccaaaaagcaaaacaaaagaaactcgtatagtcgatcgacgaccatgcatcacatttccttttcctcgatcttctcttatttccgcagaaaaacaacgaaggaaacccaaccaaggaaacgcatgctattgcttaagcatcgccggaggagctggtcgatcgctcgctcactcacgggcctgattgttccggtcacctgtcgtcgtcgtcgagctgagacacgctcctccagaagcccgtgccgtagaacctggcccacacctccttctcaagctcccccgtctcctccagctgcaaggcgggcttcaccggcagcgccaccgcctcgacggcgctggcgtccaccttgacgacgacgccggcgttgtccaccgggagctcgtagatctcca

SEQ ID NO: 6281 - DNA, 317 bp, Zea mays
ccgcgactcgaggcaaccctgcgcatggcccaacagtgccaaccaagcacatcggtcacaggtcagtcagccgcgggagaaggcgcgacggtcgatatggccaaaagtgggccggcagtaatggcggcggcaggcgagcggaagcagcagtcaaatcgtctgcaggctcacgtcccctcctggagcagcaggggagccctctcccacggcgtgaagacgacgcgcccgtgttccgttcctcgaacggctcgcgcaacggctgccccgcgaaccactcgtcccgtcgcattaactccgcggcagggcaggcgacacct

SEQ ID NO: 6282 - DNA, 580 bp, Zea mays
aaccttgatgttgctgatgttgagctgctgaaagagcagtatgcgtgttgcacagaagattatttaacttttgaaggtatagaaagctcttgccaaccagaaaagcacactcttcctgatgggcaggtaggttattattcattttctgccgtaaatcttctgtcaaacatacaagttggtcctctcttattgtgtgtctacataaatgcatggttattgtgtccttgcctcttttcttgcttttgggtccaaatacagtaacgaatctatacaaactagtcttttataaccgcttcttctccaggttataacaattgaaaaagaggggtacattgttggtgaagctttatttcaaccacgtatattgggcttggaagattatggtatcgttcaccagctagttactagtgtctcaaatgtttcatcagagtaccatcgtcagctgcttgaaaataccatgttatgtggtggcacctcatcaatgactggttagttattgatttcatatgccagatgccttttgttctttatgtgcacctttgttttattcaacattgtgagctagctatatatcaaatgc

SEQ ID NO: 6283 - DNA, 588 bp, Zea mays
ctcgtgttcctcgtctggttccttgctgtcctcctgctcgtcctcctccgcccaaccgaagccagccacgggggtggaggaaggaggcggcgtccgcgccttctccacgatcttcatgatctcctccacggactggacggagtaggtcggggcgctgttgtctttcttgtagtacatggcctgcgcagcctccgtgagctctctgggcaggttcttcaggaaccaggggtggttcctgatctccctgatcgttattctctgcatgggtttggagatgcaatgcaatgaaaccaacctcgtaccaaataagaaccgcttaaagttaagatgatcctgagtttacatgtatgggttacctttgcagagtttgcaacaaagatccttgaaagcagctccttgcagtcttgcgacacgtgcacatactctggtattttgtattggattgacatgatcctctacgaaaaagaaaaaggatatacaccaagaaaaacattataagagataagaacctggggttttagatagctttattatattacgggaagaagagaagctctgaagttgttaccccgatcgtctttctgaaat

SEQ ID NO: 6284 - DNA, 365 bp, Zea mays
cagctcaagcctcctgcaagacccaagctctattcagggctcatgccccaagaggatttggatccgtaccgtgatctaataccaggcttgcctgaagacttggcgaagatatgtcttgcccttgtccctcgtgctcattttcctgccatgggcgcagtttccaagaggtggatgtcgttcctcgaaagcaaggagctcgtagctgtgaggaaggaggttgggaaacttgaggagtgggtgtatgtcctggttccagatgctggggcgaaggggtcgcactgggagattttagagtgttcggggcaaaagcagagccctcttccacgcatgcctggactaaccaaagcggggtttggtgtggttgt

SEQ ID NO: 6285 - DNA, 684 bp, Zea mays
acttggtcaaggggggtcacgcaagtaccatctgacatgtaactggctcagatactttaagaatgatagagataggcgggatttgattacttgtggctctgctgctggagttgcagcagcattccgtgcgcctgttggtggtgtgctctttgctcttgaagaagcagcatcatggtaggaactatttccctttgtcgcgattgttaattcatatttaaaaggtgctgccatcttgccatatgcggtgcctttggatttgtaataaccttgttaccaacctgaaaatgcagacctgcatcacaattgtagtaggcatatcatgacttccaaatatcaatcaagtgataggtcttttggataagaaccatagtttgattgcttcagtatgctgataggagaatttatctatttgcaactgcatcagatgggtgatgctgacattttgtttttgctgcattttctttccatttgactgaatgggtctctacttcatgtttcaggtggcgaagtgctctcctgtggagaacattctttacaactgctgttgttgctgttgtactgaggggtctgatccagttctgtcgtagcggaaaatgtggtctttttggtcagggagggttgattatgtttgatcttagctcaaccgtaccgagttacagtacccaggatatcattgcaattatt

SEQ ID NO: 6286 - DNA, 805 bp, Zea mays
ttgaggatccacacagtatgcagcctatccttcatcttttcccacctcctctcgtttgctccagtggtcaatgtgtaaaatttgcctgcagcatcccactcacaattagtagaaaacattagatggcagtgaccagtgacggcatttggacagtttttccagttacgacaaggttcagggtagtacaatatatcacatcttactgacggagacgatcacgggtggtagatcataccatttgcaattacaatagcaccaagtgcatgtctggtgtagtttggagcctgagctgtgaactcaaaagtgtagtaagccctcccatcaacatcattctgcatcagaaaacacatcttgtaattttaacaacataagtaccaaaatatatctttcaagaacagaatagcatggccaatgttccctttctaagtacacaatgttccgcaaataacaaaaactgatcctaatatacaaatgggagaactactagctaatttatggtggtatctatatgttttatctgtcatattgccgcctgtactttcaagttggtaactggctacgtaatcttttattagctcagcataccagctgaaacttggaaaccaggcaacaaatttcaatacatgttgtaggtggaaaccattcattagtacatttgctattttcagagagtagctgttcagcttactgctcaacctaaataaaatggactcagagagattcgtcaatcagcaccaactaagctcattccgtcttttataattctgtccacgtaaaccaatcggcatgcgtgaatgaacttatt

SEQ ID NO: 6287 - DNA, 390 bp, Zea mays
cgaggtcacccggcgcggcgacaacctcgagttctccgtcggcatcgtctccgcggacttcgggattgaaaacttcctcgagtgccccacctgtggctgcgggttcgactgcaacgacctgctcatgctgcagaagcccggcgccgccaccgccaagctgcgcctgcggggtgccttctagaactccacttctgcagatttggtgactgctgctgtaagctgccacgactagtagtgctgtatgtctagtagatgtgggttaataaagagggcaaacttgaaagatcccagcttttagatgtgggatggggtaaccaagttcaggactcgatgtcatgtttcaccaactgtttcagacagttctaggaacagccagagaagcaattaaga

SEQ ID NO: 6288 - DNA, 406 bp, Zea mays
agcattggcttttataagctggtttgcgctggcgccatcctgtatcttgaatttctggtcgatggcctccagatgataaatataggatgttataaaacatagtatttttgaatggtttctggacaaggtcgctgcttatggtagcagcaaagcaacgcggtgccgtaaagctaattgtaatacccagaaattgttgaatggctgtggaatgtagcacgtggtcgaattgtctgtacaaaatacggagaggccttctttggatctgaaaaaggcttctgaatcttgccagtccttcctttttacgttaacatgtttctcctgtgtggtttgttgtattgtacgatggcatgcctaaatggctcgagatgattgtttttatgagtcttgttggcatcacgcatataag

SEQ ID NO: 6289 - DNA, 690 bp, Zea mays
aaggtacttgcacctgtgagttttgttgcatttcaacaacgaaatctacttccgttccgcctacctgctgcctgtgtacgttgttgtctgattcattgtgttgtgatgcatattgcagtatcgtagcctccagctggagttcctgggtagctacctttgtgagctcagcttgctagactacagcatgcttcgcttcttgccgtcacttgttgcagcctcggcggtgtttgttgcaaggctgacccttgatccacacacccatccctgggtatgatattgatcttcttgatcccaatcattcctgtctcactagttaccaaaacaccaactcattttgttatgtacggttgcagagcaagaagatgcagacactaactggctacgagccatctgagttgaaggactgtgttgctgccatacatcatttgcagctcaaccggaaatactcatccctgatggcgacccgggataaattcaaggaacgcaaggtaagcatgggccttgacagccgcacatggttttatgtcagatcgtttgcataagcatagtcgcagtgtcctaactggaataaacctcttgaacagtttaagggtgtatcagctttgctaccacctgttgagatcccagcgtcatacttcgagaaactgaaggagtagttgttcctggacaatctagtaagccaaacacaca

SEQ ID NO: 6290 - DNA, 367 bp, Zea mays
atttcagaaataagcaacccaaaatcaaggaaacaacaaagaacgtaacatcacatattagataagattatactcacatacttccaacaaaacagcatagttatgcaatgcttagctttgaaatctagtgctggaaacagaacaaaatgtcttgggtatgtaacttgttcgaaacaagcagcaaagctgaaagggcaatgccactggacacccttgggacgctacagatctgggtaacaactcatttcagagggataaaccgcgaggagtgagtggcaccaataccgggcctcccgtgcttgaccggcttgtaggaaatggagaactctgcaagatagtggccaatcatctcaggcttgatctcaac

SEQ ID NO: 6291 - DNA, 383 bp, Zea mays
ggagaggtgtgaggataaagactgccacaggaagaggcggctacatccgtaacatctcataccgcaacataactttcgacaatgtccgtgctgggattgtgataaaggttgactacaacgagcacgctgatgatggatacgaccggactgccttcccagacatcacaagcatatcattcaagggaatccatgggcagggtgttcgggtgcctgtccgagctcatggcagcgacgtcatccccatcaaggacatcagcttccaggacatgtcggtaggcatcagctacaagaagaagcacatcttccagtgctcctacctcgaggggcgtgtcatcaggcctgtgttcccgaaaccatgtgagaacctggacgtctatgatgag

SEQ ID NO: 6292 - DNA, 968 bp, Zea mays
  misc_feature (963)..(964): n is a, c, g, or t
attacatattgtcaggaaaaatgtggaggacttaataccaaaagcagttatgcatttcttggtatgtgattcatatccgattgtcctttcggtatgcaatctttgtgctatttttaatggcatggtaggctttagatgtcggtgctaaagctaaacagctaaactactaatgagtaatgaacattggatttaccattcttttggcctcaactactatcaagtatggttacatatctacagcactgcatttcttttcgaacacttgagcaagcaccactatttttctagattgatcgtgcaaccatttatattaattcctctttcttcagtcaattggtttcttcgtcagtgctaaaattgcattctagctagcagatagaccacatgccactcttcttttcttgactcagctttatatgtctgcagtgggatagctgagcagactgtcttgtaaatctacggcttcatttcacttatctgtgacattgattctgttgcaggttaatcatacaaaaagggcgctgcataattaccttataacaaaactttataggtgagaatacttatttgctcttatttagaacacaacctattacatgttaagcaaaagataatttatgcactatggctttacaactttgctccaaactcttaaatatattgcccaattcagagatgatcttttggaagacttgctcaaagaacctgatgagataaccataaagaggaagcagatacgtgaaaatctcaaggtccttcaacaagcttacaaagtacgttttcacagttctttaattcttccgttcagaagtcttggcaccacttggttccaacactagcttttcacctcacgtttcttctgcaccatgcagactttggacgagataccacttgacgcagaggcagtagagaggggtggatactccctggattctgatgcgattggtctgccaagggcccatnncttc

SEQ ID NO: 6293 - DNA, 378 bp, Zea mays
agagcctaccgtttgtaactggaaggtcccgggttcgagccccagcctctgcatattatgcgggtaaggcttggcgtttaaagatacccttccccagataccgcacagtgcgggaagcctacggcactgggtacgccctttagttagcacaagggtatttttattattgaagtccttacaaggtcatgtcgttctagtgtttctatttctttgctaccagtaggaccctctcctgatatacagcgtatcttggcaggcatagcatacaattggccaattcttcttggtggacaagctcactggacagttggacttgtagcaaccttgatggctattagtagcatcattgctgctgatacatctgctttcctttgtgga

SEQ ID NO: 6294 - DNA, 388 bp, Zea mays
agaaaattatattgcacagttgtcagttaggatggaaatttgatatccatcaataaaattgataaattatagaatggtgcaccttatcttttattttactagaacacagtgcaacttctatatattcttatttgtaacttggatatgttgcaaaaataataaatattactagatccttgcaaagagaagggggaaataataaaatctagaaaagaataatacaatacaagggagctttgaaatgaaatattatttatatacgaaccttctatggattgaaaagaccgtttaatctgttactggatttcattatatttgattcagctcctcagtgcaggtatgtactgttttcagtatcatgtttattttatgttctgaagtagaaatg

SEQ ID NO: 6295 - DNA, 370 bp, Zea mays
tcgttgggtttgagccttaaaacccaatgataaggttacagaagaaaccagagacaacacatggtgttattgcgaagggtacgtgaaggcaaaacaactttgtaaaaaatgtgtggcagtcagattaatgcatcaagagttggtcgattttgaccatatggctgagtggatagctggcccatccgttcagctctctctcttagttggctcagacgctcagttcgttataccaaaccagcgctttctcttacatggctcagctcagtataccatttcacaggtgctcaggcagaggaagcagaattggggaagttcgaatccttctaatcacggtgaactcaccagtgccaagcaaacaattacaccataa

SEQ ID NO: 6296 - DNA, 373 bp, Zea mays
gacgtcgcatccctccgccacccagagcaagatgcagagcgcgtcaagaaccccgaatggctggtcgtcattggggtctgcactcacctgggctgcatcccgctccctaatgcaggagactttggtggctggttctgcccgtgccacggctcgcactacgacatttctggtaggatccgcaagggcccggcacccttcaacctggaagtgccgacatacagcttcttggaagagaacaagcttctcatcggctgagattgctgttagtgttgttcgtgtcatcgtgtggccctgtcgtttttgtttgatcaacaacttcaccttttctcttgcctgggttagggcatacctttgtgggctgtttctgagtaaa

SEQ ID NO: 6297 - DNA, 360 bp, Zea mays
gccacgtcgtcttcggattcgtcagctccctactggcgtcagctcccaactggcagtcctataaagtggatgatccgaatgcgccgagaatgattcttctcgttattttctacgcgaacgtcatcttgctggctgaaattaagaacgtcaggatctacatcgagacggcaactgccgtggtgatatcttacgtgtcactacttaaaatcagctggagctacatctggctcgttctcttccccattgtcgcgatcggcttcatcgttgctctgtgcaaggagctcagtcacgaggacgaggccggtggatcacattcacaggagcagagcaatgaaggtgaaggtgaaggcgaagctacta

SEQ ID NO: 6298 - DNA, 599 bp, Zea mays
agcctctccatgtctggcccttcgaagaagcagcgcggcatgccggcactggggtgctggctaatggctgtcggcaccttccgcttggccttcacctggtcgtgcttcttcggctccgggtcgctctgctcagccacctactccgagatacagggtgcgtacgttctgctgaccttgagactatggcggccggaactcgatcctgatgctagctagctatcctttcagcttcgaaaccatgcatgcattatgagtttatgacctgggcttttcagtgatcggcgtgcatgggcgcacggttgcggtgtggacgctgctgtcgtgcaccctctgcttcctgtgcgccttcaacctcaccagcaagccgctgtacgcggccaccttcctgtccttcgtctacgccttcgggtacctgagcaccgagtgcatggtgtaccacaccatgagtgcagctagtctcgtcccgttcaccttcatcgctggtacagtacaatacatggatataattagatgacagggtcgatgacgacatcgctactgctgctaatatatatatatttcaatgcgcgtgcagtcacatccatggtctggatgctgat

SEQ ID NO: 6299 - DNA, 390 bp, Zea mays
tatcacctatatgaaacgagcaaaaagaaactgtcctgatactggcagtagcagctacaaaccgcgtgcttcattttattcaccatttggagcagaagcttatgaatccaagtctacaatgttacattacatcgcagccacagtcgttcaatcatacgtccagtttctcagctcagtagctaaacaatcacaatccttgccatcttatagcctagtaaacctcgacgtgccactgcttgttctttttcagctgtgacagcttctggtcccagctctcgcctctttgctcagccaccttcttgagcgtgtcctggatccccggcatcatccccttcaaaccacagaagtaaatatgcgcaccgccatctagcagcctgaagatttcgtcgc

SEQ ID NO: 6300 - DNA, 431 bp, Zea mays
  misc_feature (31)..(32): n is a, c, g, or t
  misc_feature (423)..(424): n is a, c, g, or t
actgagctcataaggtaattgcagcatatgnnggatgatcatcagcatcatcccattcatgacaaccatgccatcaggtcgtcaaccatccaaggtagctgaatttttgagatgccacggcgcagcccgatggaagaagtggcttgcgaatccgggcatatggctcttttggccgagagtgtacatatttatcagagcaacaacggcgcgcgtgttacaggagtgcagcatagcggaggcctcaagcatcggcattgttcccagctgataagaatacgcccccaatatattttttttgttatttttttgtccattttgcgggtcaaacgtcgacctggtatgtgtgtctagtgcgctagcagttaacctattcgaaacgcttactgacctgtgacgcccatttctcattcatgctggcactgnntaagatg

SEQ ID NO: 6301 - DNA, 385 bp, Zea mays
cgatgctgaaccgaacgaggaagaagcctgagcagcacagacagtgagtaagcaaacacttgacatgccttgcctcgcgagctcctgcaccggaacagtataaaccagcgaccgccgcggccttgattattctataagaacggcgctcgccgtcgccgcttacccgaacgcactcgacgctgtcactctccgtcgacgaactcgaactcgtcctcacggaggtgggcgaagaaccggacgggcttgggctggccctcgacggcgagctcgaactcgaccttgaaggggaagttggccgtgacgcgcttgcccttccacacgcagacgtactgcttgacgacgccctccatgccctggatgtccaggtcgggcgccttgaggacgt

SEQ ID NO: 6302 - DNA, 514 bp, Zea mays
ttgccttgtttgggtgtcccactgttgagcgaagaacggtttttgcatcaaaaagattaagagccttcttcaacatccaggaagacaaagtaagtttacacagttgcgtggtggggtagttggcatacatcttaacacataatattcggacagagaaaaaacaaaaggtcctcctaacatatgctcaaggctaactttttttaatcttgccccatttcagatatgcggttcctgtaaactgagaagttcgtgcaagtttgtgaaccaggaagtggccaggcataatagagtgattctatcagatacgatgagaattatctccttgtttgtactggacgcttgcccacaagagctcgagattaccgctgagttaaaagccagtgtctgcaagctgctaaaggacgccataaatctcagcagttaactgctgagcattacggagcagaagtttgctagttttcttgtccttgtagttctaatagcgtgctgtcagcatttatctggacttatggag

SEQ ID NO: 6303 - DNA, 391 bp, Zea mays
ctcttggcttggatccgcccgtgaaattcatccctgcgtcggctcacccacgcagcgccggcggcctccctcttgcgtacggagtagtaaaataagaattccggtcgcacctccgatccggccgtctctccatgagcggccggtttaaataggccggggacgacaaagatcgggcgcaggtgctggctggcacgcatcaggtttggctttttttgtgtgtgtgtgctatctatctccttgttccctcggattgtccttgtcgttgtcgccgtcgacggcacggcgatatccaagggagggaggaagggcagcatatcatggactcgcacaagggggcactagtttggggcgggggcgaggtgaggcggatcaacgtggtctacttcctgag

SEQ ID NO: 6304 - DNA, 1275 bp, Zea mays
  misc_feature (1254)..(1256): n is a, c, g, or t
  misc_feature (1260)..(1261): n is a, c, g, or t
atgaagactatctgtaccggtactggtggtgtggtcccaagcttacaacactgtaatatctttgctctggtaaacctacttcgacagccagtagatgaagatgagaaacgtgcagacagatgcaacgagcgaaagaatgatggtatccatggatttcttccttctgatcgatgagaggacgtggttaatctgtaaggttgagtaaggtttccatgagatgtatatcctaagaaggcaatgaatggactttatatcagatgcgatacatactgttggaagctggctgctgacgttgcttatctttgtagtgatgccaccgaatgttgaccgttgggtcatgagagaaccaagtgttgcctgagcttgtgatatcacgttatccatctggtatcattaaacatacagtaactcctcaggcatacaactgacagcattcatcattctgaagtgaaacatgtagtattattctagacaaaagtagtagctcgacagaaggctctccctgaaactatcaaatcgatgggtttgctatctataacaagtatataaatattatggtggagattagtaaggtcaataaatgcaacagtaacaataataaatccttttggtaactaaactggagattagtaaggtcaccaaatgagaaacaaataaaatcttctgcctttagatgattctttcccaataccagcaaacaaacagaggtacaacttaatcgactatctcgcccccaataccagcaaacaaatagagtacactcaatcaactatctagcctttccatatcagccacattttagagaaaattctttctatgtcatcaaaacttatacttatccccctgccattgaaaaaaatatgagttcccttatatgccattggttttatatttttccctctagctgctattgcagttacatactgtataaaatctccgttactactatctgtgctgtgtcatcctatctgatctatgtaacttccatgcccgtatcaccgcaagaaaaaaactagtcatccatgccgaaggcttctatgccacgttgtaggcctctcgcgctgcacgtcaccactcgccactgcaggccactcacgccacagcacaggtttaaattcatattgatgcttcttttacaggagtgtccttccatattgttctctcaagaagaaataggagaagagaaacagttgaaggattgtccgaaaggaggatatatttgtacctgtccagtactcctgccaatcgcagctnnncccnnagaagaactgatca

SEQ ID NO: 6305 - DNA, 1119 bp, Zea mays
  misc_feature (1097)..(1102): n is a, c, g, or t
  misc_feature (1115)..(1116): n is a, c, g, or t
tgtgccctctagcactgctgcatggcctaaccaaaatggaggaagtcctttgtgggcagtccgtgttttcacctggggttgtgggcattcttcttttctgcggaagaggccccacataagcctcatcggaggtgaggctcttcagagcaacgtctcgtacttcatacgtgcgaagaaggatctcaaaggttctaatatctgtggaacacagttggttttcgttagctccttcagcatggcaatttgaaacatgtgaaatacccttgcctccaacaaaggcaaggcgttggagttacatataaaagatccttgattagtaccaacataagtaagactctgtaaggtaaatgtatacaatgtgagtatgtgacttaggagaacctattatgtagtccattcaagacacttgaaagtgatacgaaatcacatactattcgacacaaattttatttactgctcatgaaataacactgcagttaggcagctagtactaatcaagccacattaacactgggagcaaactatataataattgcagttactcctgtctcttggacaccgtgctgaaagaatgcatacgcatgcaatcataactaggcacccaaacacattctggaccttttttaaaaaaaaacacacattttgtgtccaacatattcacaatcatgtttgtagcattcctctcagtttctactcctttcctttcaaaattttaagccatccttactatctagacataatggttggaacgatttataacagagggtgtagcaacttaattttattagaagtaaaaacaaatttaaatggacagtacatgccagtaaaaactacttcgacctaagagccccttgataatgcaggcatttgtcatgtaagaaatctggacaggtgtttccaaatagccagtctctagagtacactatgtttgataccagaccaaacattatcaatcctatctagatgaagcaaattaaaggagtgtaccatacctgtgaaacaagtcttcatggcctcacaagcacgctgcacttgctcaatacaaggcgaaaaggagcacagaacaccgtctttctttagcatcaatccgacagatnnnnnngcaagccaaggcnngca

SEQ ID NO: 6306 - DNA, 843 bp, Zea mays
cctcatcccccctctccctgtggcatccgcccctgcacatatgattgcacacgtaggggtggatatcgagccagcttaagctcggctcgttaaagaaacgagctggctcggctcgactcgttaagcaaccgagccagagaaccagctcgtctcgttcgcgagctcgagctggctcgtttagctcgcgagccataacaaaaataatatatatgtgtatatacaacaatataatcaattgctagttaatttcatactaatttaacactagaaaagactaacaatactcataattttattcatcacatcatttaaaccctaaattaacataattcatcacatattaattcatccaatacatatagactttgttttgcagataaatgttagctcattcgagctaacgagctggctcgttaacgaaccgagctgttatgttagctcaactcgtgacaaaattaaaacgagccgagctgagttgaccatgagtccacgagtattttatacagccatatgcacgcctactgcagacaaaccaaagcgcaaaaggagtatcatgtggtaaactctgacgaaaggagtctcgcggcggagtcacgatctgcttcggtgcccgcgtcaatcgtgccgaacagctctcccatctcctccagcgtccggccgcgcgtctccgggagacacgtgaagaagaacacccacgagagagcgacgatgccggcgtagagaaagaagctgccgccgatggtgatggcgctggacagcgacaggaaggtcatggagacgacgccgctcgtcacgcggttgcacgccacgccgaccgcgtagcccagcgcgcgcacacgcaac

SEQ ID NO: 6307 - DNA, 485 bp, Zea mays
agccgtcacctacgtcaaggagaagtacggcaaccccacgatgctcctgtcagagaacggtaattagctagcttgtcgtcatgcatgcatatcatcccctgcatcagctagcttgctgtatatatagtatagactggcatgatgcacgcacgcatgcaggtatggacgacccgggcaacgtcacggtgggccagggcgtgcgcgacgcggcgagggtggcctactaccggagctacgtcgccgagctgaaggcggcgatcgacggcggcgccaactgcgtgggatacttcgcctggtcgttgctcgacaacttcgagtggaagctggggtacacgtcccggttcggcctcgtctacgtcgatttcaggacgctccggcgctaccccaagagctcggcgtactggttcagggatgtcatcgccggcagcagcaactgaccacgtacgtacggtctctgatcagtcgatctgatggcttgtttacgt

SEQ ID NO: 6308 - DNA, 390 bp, Zea mays
ctctgcggacatgctgccgtcgtcatcgtcgtcgttgtccttcgtcgtccacagcaacggcagcaacgtccagctgccctgaattcgatcagctaatagtcgtcgtcaccagtcaccaccaccacaagcgatatgatcgagctaatgaggaaggaagctagcagagataagagatgatagtacttagtttggtccttgttaatgcttgacctctctttaatctttcgttttttttttcaccgatctactcccccctagctagatggatcgtatcgatcggttcttggttttcttttcgatcccgctgtgccgcgaccgcgagacacacgtacgccgctgcagtgcagatcgagtcttggggggccgggtctcgtaccgttcccttacgat

SEQ ID NO: 6309 - DNA, 356 bp, Zea mays
gacggcctgtacctgaggagttcccgggaagaagacgagtgagtgagtgagtgattggtagggtaggcgactaggcgtcgcgtcaggcagtacgtccttttggcgcctttttttcttctttcactcaccattggcgaccaccaatgaatgatgacactgactggggtgtcaacatcgcagctggttttgtttggtctcatgttgcatcactcgctgctccacgatgccttgctatggttggggggagatttgctccatccaccccacgccggtcaggcgacagagcctccgctgcgtcgtctcatccgtctggtgagttgccactgtcttagaatctgagtggtacggtacgtgtg

SEQ ID NO: 6310 - DNA, 365 bp, Zea mays
tgctcgatataaactcctacacgaagaacctcctttcagtcatgggttccatggccagtgctgctggaggcaatgaagggcctgatcccagggaaattgagctttatcttgaggagattcttgcgttgacacagcttggggaggactacactgaattcatggtgaataagatccgtgtattgagagatgtgaaacctgaacttgggccgcgggcgatgaaggccttccgtaatggtaactttaataaaatggagcaggatctgactgggttctatgttatcttcgaggagtttttcatggtggagaatgtgaggaaagccatacggattgatgagcccatatcagatggtctcacaacgtcaatg

SEQ ID NO: 6311 - DNA, 867 bp, Zea mays
cgtaacttctgcagatgttccaaaactgtgatatgacattcccatttatgtgttttagattttgacagtgtctgtgattttattggttcagttggttattgataaaataactaaaagctatccatttctacacatcttgaggaatgctaaattggtagcacatatgtaagatatgataaaattctacctgtcaatgtaacatgtgcattgcatgtttgtacacagacatctgcatatagattgaattttcattcttttggtatatggatcggaaaatgtttcaattgcctgttgtttgtttatctgatatgaggtttctgcacgctaagtgcaactagctaatgggtgagcaaacatctatgtgcagagcaattgtcacatttggtgtgaatgcactctacgggaggtataatgttcgacgttccatctgggcaggcaaatggaattccactaatgcatatgattttgtaaaatacacaatctcaaagggatacccagttggctcttgggaatttggtaaaactatctttttgctactgaaacattctgtctcatttcttatattccaagatagaagttctccaagtttatgatgcatgaaatatggggtgacagagacagtttgtttgtgaactacatttttacacagtctcttgttttgttaggcaatgagctgagtgggcatggaatcggagcaaaagttgatgctaaactttatggaaaagatgtaattgaatttaaatccatccttcggcaattgtataaggcaccactgtcccagccactcctgttagccccgggagggttctttgatcaacagtggtattctcagctacttgagacttcaggtcatggtgttgttaatgc

SEQ ID NO: 6312 - DNA, 396 bp, Zea mays
ctcaaagcggcggcagcaatgcagacctcatgtcggagctatccgcggcggacaccttcgccaccgactgcggggacaccttcgacgagcgaccagacctcaactcacccatacccggtgcgcagcgccacgtcaaccgcctcatcagcaactgccttgacctagcagccaccattaaggaacaaccctagatgcctatgatgtggacactaaaaaaatttatctacaactggctgaagaagaaacagtcccacaacctacttcaaatttacgacatgtctgcacataccaatgattgtgtggcttatcgattttggctctttttatgtcctttgatattgctggggcataaaaagcaatcatcggttattagtaggtggatacgtgtcgcaaaaa

SEQ ID NO: 6313 - DNA, 360 bp, Zea mays
atttgaagttttaccagatacactgttcaggctagatctttgatcatcatgctttggaggaactagccttctcatgttcacaaccctttcaaccatcttattacccatttgaactggattcacactgtcacctccattgagatgtgaccttctcactgctggcatggagctccctgaaggcacgctgccacttaaagtccttcctctggagggagagcaagactgccgtcttggtcgaccagctggcccactctcaacagagcaagatctagaactaggtgccccaggtctgcccctagtggcagaggttggtctttctggtagcgatgtccttaggtttggaggtgcatcaagagagaa

SEQ ID NO: 6314 - DNA, 891 bp, Zea mays
atcgctgatatccctcctgatgagtactcgtggcgcaagtacgggcagaagccaattaagggttccccacacccgaggtatgaaccgaacaagaaatattcaactaatatgaaaaatgtgtatcaaatcctttgcagtcataatgattgatgcattattccccttgcaccatgggaggtggcatatctgcatcaggctctcagggtgccccttttatctgtagaataattgtctgttgatcctcctccccactttatcttttccttcctcccaagtggttctgcaactaaggcctgtcgataacttagtagctagcacaattgaatatttggttagtggatagtctcagggctcaactctttttgtgcccatttactgacaaagcaatgatctgtcatggtgtgtgtgtgtgtgggggggggggaccaaaagtaggtaaattattattgctacaggcgtttgaatgccatgttaggctatctacatcctaatcttgattgcgctcattcccctaccccatatccaactttaagtctgctctggatgataggaaaatgtagctataccatgaaggcaagcacatggggctgattgttcccccctgtgtttcacatattctctttggctttaatcaaatgcaggggttactacaaatgcagcagcgtcaggggctgcccagcaaggaagcacgtcgagcgatgtgtagacgacccggcgatgctaatcgtgacatacgaaggcgagcacagccacacccagctgccagcacagcctgcccagacctagaagatcagtaaatcgtcgctccattctggaagcgcggggagcatgcctttgcacctagatggtcatgtagaatctcaggccttcgatttcgatgcagcagcagca

SEQ ID NO: 6315 - DNA, 395 bp, Zea mays
gcacagatgactactatggtaattttaattcttcacatgatacattggcccatggcagcagcaccactgcttgggataagcaaaacgacaaagctcaagacaactcttcacctgttgtttttgatcaatatgattctgatgttgaacaagagaatttgttggacacattctcctcaaagcatactgaacaactacctgctcccggagatcatatgagattctcaactgcagattggagtgaacagcataccagtgaatctccatccaagcagagaacgtcagccctattttccagaacagaaacacaactatctgataatttaggaacaaacaaaagtgatattccttcacctcattcttatcataacatgcgtcctgcttttgattcagatggt

SEQ ID NO: 6316 - DNA, 390 bp, Zea mays
ttgagtatgtgcaacgaaattcttggaaattattctaagaaagaaggtcaattgatgacagcggctttggcacccgtccgaaacgaaggctaaacagagtgatggatgctataggctttgaatatcctgactatgagcgactggacaagggtgctgaagggcaaaaaagaaaaagagtagctagtgctttgaataaagacaacgaagatcaatcaaagaagaagaaacaagaaaccgaggtgaaagcagttactttgaagaaaagaaaggcctcacactagtacagagaagatttatactggcggtcgtaaacctatttttagtggcgtttatcgtaaccgccagtactaggggccagtaaaaatcatcatttttacaggagggtaactg

SEQ ID NO: 6317 - DNA, 213 bp, Zea mays
cagctcatctagggacgccgtccggtcatttgctctctctagaattctagagtttgatccaatagcccaggaataataattcagcgcaaccaaaaactgatctttattttctaggagtttttccctccagtttttcctttgtattttcaccagactgtcttttccggaatcttcaaatttttttttgtttctctctcgatttctcgtgttttt

SEQ ID NO: 6318 - DNA, 399 bp, Zea mays
tggtttgccctaaaccacaaacccttgccaggggttcccttcaggtatctcaggatttgataaattaccctcatatgcccagctctaggatcatgcatgtacctactcaccacacaccacactcactgcataagcaatgtctggtcttgtgtgacaaacatatatacttcgaccaactatcctctgatatctttcccaatccacaggatcacctaactcagcacaagtttggtgattcttatcaatgggtgagccacatggacgacacccaagcattcctgtttctgccaacaaatcaaggacgtacttcctttgagagagaataattcccttagatgacctagcaatctcaatcccaaggaagtatcgaagtggtccaagatcctttacctcaaaggc

SEQ ID NO: 6319 - DNA, 1091 bp, Zea mays
gggagcggcggcggacaccagtctgtgcgctcgccatcgacatcctctacgacatactcctggacgtatgacagcaaacatgaatacaccaccatgacagcaatgggtaaatacccaccgggtattacaaccccatactcatacccacgacacaaaaataaccccatcgggtcacccatatacactggcgggtatggatttacccccatacccatacccatgtgggtatgggtcacccatcgggtcacccgtacccacaaaagctaaacatctaccaaaatattgtatgataaaaatgtcaagtatatccatctaaataccattacaaaatttctagcatcatttaaccatccattcaacacaccaaagataattggataaagtagtaacactaggatagtactacatagcatattacatgttccattacatggtcattaaattgtcgttaagtcttctatgacatcatggcctaaaaggttgttaaatagtaaaaaagatggatgactaaagtcaaagttcatgcttgggctaagtttatattgggtattttatacccacgggttaacgggtatgggtgaaggcggaacgttctaatacccgtttacccattgggtgaagatttttgcccaataacagacccacgggtagaatatttagcccacatacataccctaatggagtaaatacccatcgggtatcgggtcgcgggtacccattgccatctctaggtgagacagaatgtgataacgaatacacggtagcgctcacactcaccttggttagcattcgttttgcaagaatgtgataatgccgctgccagatccgctggccaaccattgtcgcgaccaggacactgtagaatatgccgatgactgtgaaaagcccaagcacaataacccccatgatgagaagcagcggtagcccagcttccccagcacctcccaagcaaccaccacactcgccagctgtggtagcacaaccttcgaagcaggtggtgcagtcagtccacatgcatagcgtgccaggtagatggcaatctgcacacatcctgaaattgaacaaatgttggtacaaccacctgtgagaag

SEQ ID NO: 6320 - DNA, 363 bp, Zea mays
tcgcggcttgataacgtcgacaagatgatatcatctgccatggcctcagatccagaggtgaagtctcttctgagcagcacatctgatatctggatgccggtcataacagcgtctgccaatgagaggcgggggtttgttgggacgagcagcgaaggcagccaggaagagcaggagaattccaagcaatagctggtatatgggctgttaatagtttcgttttgtgggtctgtaccgaccttatctatgttcattcaaactagtgtttccatgccaaaaactttgtggcgtaataaacaataaaaacccatgtccttcattcggattagtaatgagtgtgatgatagatctaaattactatcttgg

SEQ ID NO: 6321 - DNA, 422 bp, Zea mays
caccttgaggcttgagcgaagcccaagcccgaacctcctttgatcaacagcgggatggagctaaagatggcagtgaagtgacggaaagagcgctgcaaggaaagaatggaagagagcaggaggtaaagagagagagagagagagggtagcttgaggacggttgagctgaggcgagctgcgcggttcaagggagccgcaacgtgaaatcgcagcgatctctgtttccacattccagtttgaagtctggtctgtggcggctaccgttgtgctttggcgttccttttgctactctttgcgacagtttttgccctggtgcaggctggtgcttggtgcccttttggttaataaactgcgctgcaacgaaatgtggtggtatattacttcagttgaaggccggggcttgtttgtcccttgaactctaa

SEQ ID NO: 6322 - DNA, 521 bp, Zea mays
  misc_feature (512)..(513): n is a, c, g, or t
taggcaatgtcaacacgggcctagctgatgaaaaactttcaagctgtgtgacggagataccctgctgcagctctgcccgtactcatgatgataatgagagcgcaagatgtgtaatttgcctggtaagaagatgacacccttgtacaacagccggtttttttatttgacgttttttagtataaagttgtactgttgagagtcaaataaaaagaaatggaggtagtattatttatttcaagtcaatgcttatcaaacactggtggctggctgcaggaggattacaaattcgaggactctgtcgggaagctaaaatgcaatcacaagtatcacgcagactgcatcaagaaatggctgcaggtgaagaacgcttgcccagtctgcaaagcttctgcggcagatgacggcggaggcaccgaatgaagcgccctcccgcccccattcaccctatctcaggcgaagctgtactggctgatctggtttgctgtgtgtaaataatggtcctgaaacggatnntttgtgag

SEQ ID NO: 6323 - DNA, 513 bp, Zea mays
agaaagagcccaaagaaaaaactcctaaaagcaacattaagactaacaaatctggctcaaaggtatatagttctttttttttatcacatagctatatcgtttagctatatcgtttgacatgcctaactccatgattctcctttgatggctgacgctgaacatttgacatttgacgcatacacagccctcgcgccatgcggaaccaaactcaagggtcccaaagatgccacctccaaaggacgaggagagtgaagaggaggaaggggaaccacaggaagaccaggagagtgcgctgtgtggcgcatgtggcctaggttatgacgacttctggatctgctgcgacctatgcgagacatggttccacggcaagtgtgttaagatcaccccagctaaagcggaccacatcaagcagtataagtgcccctcctgcacgggaagcaagagggccaaggtttgatccacgatccaaggagcctttgacgagagctgtaagctgactcttcgtgctagggc

SEQ ID NO: 6324 - DNA, 377 bp, Zea mays
ctatctgaggttgaaactcagggttactattactcagctggttccaagaatcctgaaagagaaataaaattccataatccaaagtttgtttctctactgaaccatttacggttctacattcctcagatacttcccaacttggagaaggtggtgtttcttgatgacgatgttgtggtgcaaaaggatttgactcagctgttctccatagagctgcatggcaatgtcattggagcagtggaaacttgtttagagtcgtttcatcggtatcacaagtatctaaatttttcgcaccctactatcagctccaagattgatccacatacttgtggatgggcttttggaatgaacatttttgacttgatagcttggaggaagga

SEQ ID NO: 6325 - DNA, 1159 bp, Zea mays
atgtacacacggaccagtgatgaggtacggcttccacggttctggcaggaggcgtttgaggctgcatacgaggaacttgctggtgatgatgtgcaggtccgtgatgcagctatctctgagattgcccgaatgtcagcccacaaacttgagctcgagcagacattgaatgagaatgaggtacgcccaaaacctgtatctcacctcaattgcttccaaatgccttatgttttaagtaaactactatgcattctggtggtttcccttatttcgtgagagtgacacttcttaccatgtcaactcatcccacttcagaccaaacattgttatgaaggcatggcatgcatttgtatcccatttttagagcaatggtccgaattcaatatgacgcctgaggcctgacaacataggatgtttggtttcagctaatggactggcctcagcagaaccatcatgagcataatgactgatagaaatggaactaacgacttaaaacatagaattcacaaccttccaaaaacaacatgtggggggtaccgattattatgctttgattgtaatgcggtgcaagtctctgcttacctccaaatcgcttatctcctttaatgtgaattattttggtacagcaccatcagcattttttggtgaaactgatagcgttgtcgtgaattgttcggtttgcacattgtcttgtacccatgctctgtcttgtatagttttcataaacaatccatctatctttgaccagcctacctgatgaagtatctaagtacataatatacatgacatatcagatgctcaatctacaccagaacgtggatactttgcacagaccctaggcccctaactgatctggtttattcttgagactcaacaactgtgcgctaaacaggcacattaaaactggctatgcacgataataagggtttatcaacacgactttcttatctccagtgaccttgtgcaggaagagaatgccgcgagcaacagtggtggcagactggcaggtcaaaggcgagtcagtagttccacagagatatctgtggcctgaggacctgaagactgattgctgataaaatcgccaggaggtgcatttggggggtttttgaagtgtgttctggtgaaattatgaaactggatgttcactggatctgtagtgtac

SEQ ID NO: 6326 - DNA, 886 bp, Zea mays
  misc_feature (825)..(827): n is a, c, g, or t
  misc_feature (829)..(829): n is a, c, g, or t
gctctcttctccttctccagataatataatacgtatatatatgtcacaatctgattgctatgccctgctgctgccctttttaatttgcttcttcattgttgctgcagtttctcgcgatgatccagctactggccaggtatatttatatactcccttcgtttcgttttaactgtcgctgaatagtgcaaaattgaactatccagtgacaactaaaaaaacagaaggagtatataactcttctcttctgtaactgaactgagttacaacttacaaccagccacaatttatacagatttacagtagcgttttcttcttcttctttctttctttctttaacagttcgtcccaatcaacatgccaagcgacccgcagggactgcaatgcatgctcgagtatctcagccaaacctacaacaacatccccgtctacgtgcaggaaaacggcaagtgtggccggtggcctactcatcaacatcaaataaataaataaataaataaataaataaatagccagcagttttttctttgcaattcctgacgactcctgttctgctcttccattccgttgctgattaactaggctacggggcgctcttcaacgactccatccatgaccacgagagagccgagtacttgagtgcctacatgggcagcgcactcgctgcactcaggtacgctacgggatatatatatatatcagttcgatcgttgtggctatatatcgatggaataaaattaactgatccaaggcctgctgcaggaacggagccaacgtgaaggggtacttcgtctggtcgttcctggacgtgtttgagctgctggcggnnnantactcgcgatacggcctctaccatgtcgattttcaggacccggagctgccgaggacg

SEQ ID NO: 6327 - DNA, 372 bp, Zea mays
cgtcgacgccgacgagtggggcgacgagaacaggaggatcgccaccgagctcagggagcagcagcgccggctcaggaaggcgctggaggaccaggtgcaggtcagcagggagaccgccaagatggcgcgctgggtcaagcaggcgtccgcgcgcatgacgcacgccgaggccattgacgacctgctcagtgactgcgaggacgacctcaaatgagctcacgccgacgctttcctcgtcggttcttccactgtctttgtcttgttggtgatcacaagtctgtcaaaaatgctcatatgttttcatgagtgcatttgcatccatgctttggtacaatgcttatacagaagaagcagagtcacgaaacaatgcta

SEQ ID NO: 6328 - DNA, 1035 bp, Zea mays
aaactatgatgattctgtactaattaaaactgctgatgttggtcaggtaaaagtgcatgtttaatgtatgtcacctgtttatgtattaaatttcgtatcttcaaatcgtccactgaaaaacaaaccgaaacagatgattatggtaagagaagaaaatgatcctgctccagaaggagtcgagtacaagcatgggcttactcctccaatgagggatgcacgcaggcgacgtttccgcagagaaccagacctgaacgtaataaaaatttattgccctctagctctacttgttacccagttcatgttcatagaaacacttctaggtggaaccctgattattccttgtacaatttattgccctctagctctacttgttacccagttcatgttcatagaaacacttctaggtggaaccctgattattccttgtacaattttgcaggcagagctggttaaccaagttgagaagcatcttatcagtatcatgcatggagtatctgtcagtatccttttgttttcttctcctgccacttgctaaatggtagcatgtgttgtattctagcagctggggaaaaatggtatatagtactctttttttactatttatttaggtaatagttttctcagtatttttctggctactaacgttggttgacaaacggtttgcctacatggagctccctccctttttgacaagcacaatgacgtgtttctttgaatcttgtctgtatagtggtttcagatagatgtttaatgttttgaaagctacacttgaacaccagttatacttctgaattggttgcttataacatcgataagtctgacatgcatttggtttgttggttgaaggattctctgcctacagctttgtttcaccgttttttgcgaactctgtagatgtgcatttttccttgactattagtagaccagaacgccagtgcgacaggaggcgaagaaggtggtgatcgtaagaaacctccagtagctcgtgcagccaagcagcctggggttcaggagcccgccgcgaaggagagaagc

SEQ ID NO: 6329 - DNA, 922 bp, Zea mays
  misc_feature (904)..(906): n is a, c, g, or t
tttcttctcttttttttgttattacgatgggtagtgtgctgcaatttgtatcttatttttatttctgcttgaactttctttttgtaggcagagcaacacttcctgaagcacaatgatgccggatcctggattcaagattcggcagtgatgctttctgttagcaaagaggttccatggtatctggtaaataactgctgtagctattacactgtgattttctttgctttttcaaatataagactttcaatttagcctgggctcctactatcaataatttatgcaaatttggctttacaactaagtttatggtcttctcttggcaagctatgatttcacttgtgtggataaactcagcttacaagctccaaagccccagccatgctagctcttgctggccaggcttaaaccttaaattagcccctagcttaggtagtgttgatattgtacatgatcttgtcccaaatggatgataattctaagcatcagatatgtcaatgtttatttaaatgtttatcaagttacagttcatgatgaaaatgaatttggcttccagatttgctatatgtaccccttcatgcaaaaaatgatatcatttttaataattttatttgcagtttacaactggaatgcttctctaacctttaaacaatcactaggatgatggaactggacgtgtttatgtggtcggtgctcgttctgcagctggtttgattttaactgttgccagtgaggtttttgaggaatcagggaggacacttgtacgtggaactctagattatttacaagggttgaaggtttgtctaatcacatcttcaacagtgctaatacttatagaaacacaattagtgactaaacaattatctctatagatgctgggagtaaagcgaactgaaagggttcttcnnnactggaccctcattga

SEQ ID NO: 6330 - DNA, 494 bp, Zea mays
gctggatgagcccatgattgacgtgagctcgagtcagttctacggcgaaggatacgatgatagcgacaagaggatccccgacatgactataatcaacaagcagctaggtatttgctttggcggtctctctgggcgtggtgtttttcttcctcaacctgttgctgatggtctaaacatggactgaaatgtaggttggaacccaaagacgcctctcaaggatctgctggagacaacgctgacgtatcagcacaagacatacaaagaagctgtgaaaaggcaaatgtcgcaggcttcagcgtcgacttagatagcgtgcccctggctctcgtctagagcctagtcgcagctgttaagttgtttcggaagcgcaggtcacacatacgctagtgatctttttttttgaggccctagatgtccgtgttgttagataatcaagggatgctgtatcagtatgatatatttgtggcagagttgatgtattccatcgttgagct

SEQ ID NO: 6331 - DNA, 388 bp, Zea mays
ctctccccggccgagtttgtcttgtgcatgtagcttagtttttgttgtcggaactaattccttaaaaaccatggtgatatgctttcagccattttttatgggcagcctatatgtgcaaaaggaattgaacttgccatctggcaatttggtgaggcttatgcctctatatactaccctggcatgggtcctctttgaattgaaattggatgcttgtattcttaaattggcccagttctttttacatactcccatttttagttcatgatcctagaaattcatagaatgtgatggtatccctagttgctacgatatgacagtatattatctaataccgggatctatttgttggtccctactaattattttggtcatgtcatgtgctggatta

SEQ ID NO: 6332 - DNA, 380 bp, Zea mays
ctgctggacccgaacctccgcgagcagtgctcggaggaggacgccctccgggtgttccacgtcggcctgctgtgcgcccaggcgtcgccgaaccttcggccgcccatgtggaaggtggtggagatgctgagcggcagggatcacaaggcggtggcgcttccccggcccacccagcctcccttcatcaacgtcaaggggtccagcggcaagagcgacagctccggcgggtcggcgtccaactccgacaagtcgcccttctcgctgaaccagctgtcagtcagtggggtgcaggccaggtaaaagctagctagctagctgcggatatcatgtgtttgggctagcggcatattttttttcaagttttgtaagtcgtggcgtgg

SEQ ID NO: 6333 - DNA, 644 bp, Zea mays
cactgaccaatcgccaatgcaccttggtaaattattgcgcgctaccactaaccgaggggtcaggcttgtgagaagccagcaagaagtccagcatgaccttgttgaagcgagccggatcctccagctgaggagcgtggcctgtcttcggtatcacctccagcctagcggtcccgttcagagccctgccgacacagcgacaagtcagttggtgttacttagcagtcagcacgggctgagccatctgtttgtttgtttgtttttgttttgtttttttggaagaaaaaaaaacgggcatacaacacagtgtgcctgtgaagaaacgctcgtgaggagtacctctgaaccgcaaacgccttctccaccgggaacagctggtcgtggtctccccatacaatcagcacttcctgcacaacgcacgtccatggcgaaatttcagtcacaggctcacagacagaggcgcgggcgtgcggctagctagaggccagagcgtcatctgatagcgcgccgcgcgcgagacaacctgcgtttttaacagtacctgagatattggcgtcacttggaacttctctgtcccgaccgtaatccccttcagcagatggacaagccgctccctgttctgcgtgaagagtttctggatgaagtca

SEQ ID NO: 6334 - DNA, 1242 bp, Zea mays
  misc_feature (1190)..(1192): n is a, c, g, or t
  misc_feature (1214)..(1214): n is a, c, g, or t
  misc_feature (1224)..(1226): n is a, c, g, or t
  misc_feature (1235)..(1239): n is a, c, g, or t
ccgcccgcagcagaggcgccgcatcggtgagctcatcgccattttttagcctacctacaacatttcgcgtgcttgttgaattcaaactagctaataaacaggtcacttgtcctgcccattgcaattgcctcatccccatcgataatgaaccagtgcaaggtttagtttgttgcaatctagtatgtttggtttcgtattggcttgctaaataagttagttttaacactagtttgttcatcctttaaactgtaacaccagttggctgttccttgtttgtaccatgacaccacctaatattcaggcctggcggcctgcactagctaagcctggatagctcccaagccaccacctaccgggtgtccgggtgaatatgctaatcgggtttgctatgcttgtatctgatttgcagtgcattgttttccctttatgctatcgatgaagtaaccaaactaaaagttcacttgctttactcaacaattgctttcattgatttacttgttatgtatgatttcccccctattgcacctgctgacaagcgtataatttaccctgctatgttctctgtgcagcacgtcaaaagaaggctgtgaagatattcccacgaccaactgctggccctcttcgtcccattgttcaatgccagactctcaagtacaacatgaagtcaagggctgggagaggctttacccttgaggagttgaaggtgatgcattgtttgctcttgagccatgtttgttttgttgttctcatatcaaatgaattgctgttgtatgtatgccacatgctatttttgtgtgaaccgctgtatagaggctgatatgctgtcttttgcatgaccacaaattttataatgtttataaattttgctatctcatggtgtttaatttttgctgttccttttctacttgttgaattaccttgtgttatcttgatattagaagtaactatgttgattgcaggctgcgggcattccaaaaaggcttgctccaaccattggcatttctgtggatcaccgccgcaagaacaaatcccttgaggggctgcaggccaatgtccagaggcttaagacatacaaggccaagctggttatcttcccaaggcgtgctcgcaaggtcaaggtatgagtagtcatcttttcctgaacaattaagtatctcttgaaggcattgtctctggctgctttgatctcnnnaatcccttatcacctacttcgntgcaggctgnnnctctactcnnnnnagc

SEQ ID NO: 6335 - DNA, 915 bp, Zea mays
ggtcaaatatttatatgcggtttggtttggtagtattcctggcccttatttcaatgtgggttttaccaaatcatgtttggaaggtatgattttatattccatcgaactttatttgcagagaatttatttgtgcttagctagcgaattgtggtttcaattgtcttctatttgtttcgagttttcgtatgatgctgatacatgtcgcatatagcataactttacataggtagttgcagcttatggtgtttggtacgtccattcgatgtgttagtatctttagtctgatgcagcaaagctgtgatgtctggctttaacttcatccttggttgcacattcgttgtaatgcagctgttcattttccttctaggattcagctaattatttagcactttgctcagtggtttttgttccatcgtatgttcaaacttttattgtgggatgtgcttgtttctactacctgtaaacaaaaccacattctctgtaggatcaacttggaagggttactcttctttcaggattcatattcatcatgctgggatttggtgctgatggtgcaccttcattagtccagatgagaacgcctccaccttctgttctaggcataccgaacattccttgctccacaagtgggtattcttacacaatcttgaaactgggaccactgcaatttacaaggaaaggcctatcattagcaagtacttcagcaagcctctcctttgcagtatgtccttcacttacaagtattttaggcaaactctttggcttaatccttcattatcttacacttttttatgccttttgtttacacccaacaaatcacacctgatggagagcacactgtagagtgacttggtttgcacatgaaactatataatatgcactcccaaatttgttgtttgtatgcagatattccaa

SEQ ID NO: 6336 - DNA, 1042 bp, Zea mays
  misc_feature (1029)..(1029): n is a, c, g, or t
taacctcttatgacattatctttacatcttctcacccttgcgtggtgtggttaactttgttttgatatccaaggaaaactactgtgaagacctagtaattccgcaccatatagttttgtttcccgtgagctggaaagttttgttttacctagcttatacttatgtaattatgtttttttggtatctgatgacatataattacatgtttgcttgcttacgttgattatttgtgctcatattttatttaaacattatatttacattacagcacctaaaagctgtgttgtagatgagacctgactacagatagaattctggtttcattaagttttgcgattttctaaacttgattgtagttccctatatttggatatttgacaggctgagaagatagcatctcggatgatttatgaggatagaatgcggggctcaattgatcaggtgcttaaacaagttattttcttgaaataatctatatgatgttaaagcataaaaatttctgctgtagatttgcctttgtaagttgatagtgactggaaccatgtccacccgaatattttctgttggttcctaggttgaggctgtgatacattttgatgatgacacggaagagctgcagcaatgggatcagcaggttagtaccataaagcgtttcatgtcatggaaattggaaaggcaatgcacgtagacaaatccgcactcacttgtagcacagaagcctcatgtttgtctcaacttcctgcgatctgacacctatgccaattattattttcaaagaaaattaattaatcgccctgatcggttgtacttgcttgatacttgcagattgctggactgtgccaagccctgaatgacatccttgacagcatgtcaagcaagggaataactattccggtgtgaataaatatctcatgctgtcggtcgatggtgcatggcagaactgcttccatgccccggaatctagaatcaacattttgtatagtttgcagctgcaaatgtgtatcttgtgattttggggggaggatgctngttaagtaacgct

SEQ ID NO: 6337 - DNA, 454 bp, Zea mays
  misc_feature (445)..(449): n is a, c, g, or t
tagtactgccatctccttttcccaagttttccgaaataattaagaattcccctcgtatttcctgatccatacaggacaactactctggaagaattaatcagcctgaataacaagaccgacaggaaatgcagcaccgctgaaaattcatgtgcgcctggccgaaacatcctcgcgctcaggaacaggcagtcaggcatggtgggcctaccagccaccaacctggaatccgacaccctaaagcaagcgatggagaagctgacaactttaaggagcagctgcagcttcatcgtcgacgagcacgggcgcgtccaaggagtggtgaccacaagggacatcatctccgtgttctccccgctgtgcatggactcgaggattgacggggccacgttcttctcggctgcgctcgagcaggctggctgccgcgttgagaacgggcagatgttcnnnnnattag

SEQ ID NO: 6338 - DNA, 1171 bp, Zea mays
  misc_feature (1111)..(1118): n is a, c, g, or t
  misc_feature (1148)..(1150): n is a, c, g, or t
  misc_feature (1164)..(1165): n is a, c, g, or t
aaccctgagcccaaaaatatgctttgcaagagcagtcaacaaatctctatgcatgatttagtgtgttattcatggcacgttatacatacttagtggaactagctgcctttttatatatccctattttacttagggaccattttatcatttcattttggaggaattgttatctacttaatggactagcctatttaccttgggatttgacattccacaactttccaaagctaagatataagtctatcttaaattcataggatgagagatggaaattgattctatagatcatcatgctatgtttttactttgcaacttataccacgttttttttggcttgctccccctacagcacaaatgtagcacataagtacctccctcatatggccaacaatagtatacaaatatattcagcatacaaccatattagcttaattgaatagtgtctaaattatgactaaattgttagtattagaatggatttcacttccaaggatccaaaaaggaccttatgggttttgttaccacattgtatgcttcttttcggtgtttggtgtctacttatgaaactagctgtattacattctttgcctgtgaatggcttgtgcagcaagtttaatgttctagctcagaagtcttatgaagacttacttcaagtgtttagatttggatctatttgctttattgctgggcatacaattgataatagtcaatccatgcagcctgagaagacaacaggaacaatcaagcagcagctagctgctatagcgccaacacttgagcagttgactaaacagaaaaatgaaagaagaacagagtttgttaatgtacaatcacaaattgatcaaatatgtggtgaaatcgctggcaccatagaagtgggtgagcaggtgacaacaccccaagtcaatgaggatgatttgacacttgagaggcttgaagattttcggtctcaactccaggagcttgagaaagagaaggtacttttctatcttttgcctttttattggttatgacgctatggcgcttcatacatggccattgctttagtattggttattcctgaaaataatttggtttgccgagtaataggctggagaaggttcttgagtannnnnnnngtacatgatcttgtctgtctggggatggannnctcagcacaggacnnagtcac

SEQ ID NO: 6339 - DNA, 417 bp, Zea mays
ttttctgaagaggttagtcatctatccatcagaatgaatctgcaaagttttgatagcatttaccttacattttttttggctggaacagcatgaaacgagttgtagcagtgagaagagattggaaagtccctcgggtggcaatggagaggctatgaaaccgcttgaatctgagggcaagacgctttcccagaaagacgacaataatgatgatgactcatcagaggatgctgatgaagaagaagaagatgccgagctcacgaaacaattgaacaagcaaaggaaaaaggcaatagcagctgccagtggtcggagaaggccagtgtcgtccaggaacgcctacaaggacaagggtaagggcaccatgaactccaaaatccagaggcaggcgtgccagtggtgatggtcactcgaatgtct

SEQ ID NO: 6340 - DNA, 400 bp, Zea mays
gcacgagctcagccctcccgtggcgcaccctgacctgcagtcgagttctgtactgctatctgaagacggcgctgcgaaggtacatactcctgtcctgtccagcactccagctctccatgtgtttagctagctactagctacagcttggtgttccaattccaacctctgagttccccccctgcctgcagatagcggacatgagcgtttggcacgaagtgatttctcaaggcaaaacgacgacaaatggtgacgaacaagcgtcgtccgctggcctgctggcggggaatgtgtacagcttcggtgctctgctgcttgagatcatctccgggaagcttccgactccataccccgcacacgagcgctccctgcagatgacctcggtaacgagctatcgacggaa

SEQ ID NO: 6341 - DNA, 376 bp, Zea mays
gtttacaaatgatgttctgtttgaaagtttccacggtaatacttaatgcacatttgtgcaagcttgcattgagattcattggcttaatgaatattaattactcgctggtcctcctcctggacacgcatataattcatatagttgatacatttcttctttggtgctgcagaaacagagataaaaaagacgagaaagctcagcacgttttaatccggctataatcggcgccctcaagaaaccagtgaacaggagccaggactaacctccagcagctgcagcccatactgctgctcctgaccactctggacgatgcgaatcagtcgcatgacaacgcacagcggcagcaggataccagcagcacgaagtaagtacattg

SEQ ID NO: 6342 - DNA, 387 bp, Zea mays
caaaacgcgatctgggttccgtgaaccaccctgaaaccacagtatcatggcagttggcctcggtttcaggcacacgcgccttggccttgacgcagcaaggagggagcggtttgcgggcggcatcatccgcacttccctttgtcagtgccgctgctgcagaaccgtttcttgcgtctccaacctccatgagtcctattgctctttgaaggtcccagtctctggctcaacaacaaagtcaggcaacagcagaatttcagacacagaaaacaagcaggggcgtcatttatcagggctgcttcgtgccgaagcaaaagcaagcgaatcgtatgcagactgaacgtcattatcagtgctgcttcgcacggaatcgaaatgaaggattcatag

SEQ ID NO: 6343 - DNA, 454 bp, Zea mays
gcggttagctgggagcctgggacacagatcctggaagacgcaaagagattctaagtttaggaacccccaccccacacctagttctattcttagctcagcaaatcctcctccgcgcaaaggcatgaagcaaatgctcatcccgtcagaccacatttccccccacagagatcacatttaccgcgcacaaagcaccaacaacgatcgatagactgcatgcgagatcatcagcacagggagggagggaggaatgaaggatgatgcggcatatagactctacccaccaccggtgctcccatcgtcaacacgacgaggtctgcagattggtctgtgcgttctagagagagcctgagagggggagaggtttaccaactgcaagagcggagaaggaacacggatccaaggtttcacacgtaccgttgggagaagatgagttgctttggatgcttcaagaaag

SEQ ID NO: 6344 - DNA, 454 bp, Zea mays
ttgatagcacaatggagattggtcttagaggtccaaccaatctatttggacatccaactgacaagcagatgattgaattggatcaagcattatcacagtggaatactgactttgacaaggttccagtgacaaaaatcgcatatgggcacttcccgttgtctttctcagcattaacagagtcaggaaaaagtatcaaggatgtttttctaacgcaatcattggcagcatatttgtgtggtcatcttcatacaaggttcgggaagaacttgaaacgatactaccatcgggcagtccaggaaccatcattatcagagcattactaccaacataacatgcaccaaggagatgcattccagggtaataaggaaaactgttctgaagaagcttctcatattgaagagttctgggaatgggtgatcaccgtctcgccgtttcccagtcctgacagccttag

SEQ ID NO: 6345 - DNA, 370 bp, Zea mays
ttctcagtcagataaagcactgttcaacagattgtgtccggcaaacaaggaaggcaagaggcactttgctgacataatgttccgacgtctgacaaagttgggcgtttcaaagacagaccccaatgagcttacaccagatgaaatcaggcgttttgcaaggcttgatatcgaccctgagtccattacatggagacgggtgatggatgtcaatgatcgtttcctgagaaaaattactgttggacagggccctgaagaaaaaggtatggtgagagaaacaggctttgacatatcagtagctagtgagataatggctgtattagctcttacaacttcccttgctgacatgagagaaaggcttggaagaatggtg

SEQ ID NO: 6346 - DNA, 489 bp, Zea mays
ttgctgaactaaacagttctcattacatggcaatctgtatagaggatgactcaacaagttcaggtatgtaatcggaatatttcattctgcagacagattgctccgtttatcctgctcattcagctacatcgtttgcaatgctgcagattctggaaacggtagactgccactaggattgaaagtatggaagaccactccgttcgtggaagatatacttgtttctggaacggaagctgtaaaacttgtcagttaagtatgtgagaggatatctgccattggtcaagtgatttcgccagatgacaatgtgatgcaacgaatgtatttggacgaagtatgcgctgtgcagggaggctgaacggttttcttcgagcatactgcatgcattgatgaactgaccactgacactgtgtgctttagttaagatttggaaatgcaacgacatacactttggagtcctgatattcatattagcatatcacgacactgttt

SEQ ID NO: 6347 - DNA, 1411 bp, Zea mays
  misc_feature (908)..(909): n is a, c, g, or t
  misc_feature (912)..(913): n is a, c, g, or t
  misc_feature (915)..(925): n is a, c, g, or t
  misc_feature (931)..(932): n is a, c, g, or t
  misc_feature (936)..(939): n is a, c, g, or t
  misc_feature (941)..(942): n is a, c, g, or t
  misc_feature (951)..(952): n is a, c, g, or t
  misc_feature (956)..(956): n is a, c, g, or t
  misc_feature (962)..(962): n is a, c, g, or t
  misc_feature (965)..(966): n is a, c, g, or t
  misc_feature (976)..(979): n is a, c, g, or t
  misc_feature (981)..(982): n is a, c, g, or t
  misc_feature (987)..(987): n is a, c, g, or t
  misc_feature (996)..(996): n is a, c, g, or t
  misc_feature (998)..(999): n is a, c, g, or t
  misc_feature (1003)..(1003): n is a, c, g, or t
  misc_feature (1018)..(1034): n is a, c, g, or t
  misc_feature (1036)..(1036): n is a, c, g, or t
  misc_feature (1042)..(1051): n is a, c, g, or t
  misc_feature (1062)..(1071): n is a, c, g, or t
  misc_feature (1073)..(1073): n is a, c, g, or t
  misc_feature (1076)..(1078): n is a, c, g, or t
  misc_feature (1081)..(1095): n is a, c, g, or t
  misc_feature (1097)..(1101): n is a, c, g, or t
  misc_feature (1103)..(1111): n is a, c, g, or t
  misc_feature (1113)..(1117): n is a, c, g, or t
  misc_feature (1119)..(1123): n is a, c, g, or t
  misc_feature (1129)..(1142): n is a, c, g, or t
  misc_feature (1146)..(1147): n is a, c, g, or t
  misc_feature (1152)..(1163): n is a, c, g, or t
  misc_feature (1166)..(1173): n is a, c, g, or t
  misc_feature (1175)..(1183): n is a, c, g, or t
  misc_feature (1186)..(1212): n is a, c, g, or t
  misc_feature (1214)..(1236): n is a, c, g, or t
  misc_feature (1238)..(1258): n is a, c, g, or t
  misc_feature (1263)..(1274): n is a, c, g, or t
  misc_feature (1276)..(1294): n is a, c, g, or t
  misc_feature (1297)..(1321): n is a, c, g, or t
  misc_feature (1323)..(1374): n is a, c, g, or t
  misc_feature (1376)..(1378): n is a, c, g, or t
  misc_feature (1380)..(1408): n is a, c, g, or t
cgcgaaggaccaccaaacggactcgctgcggatgcgatgaacaaggccggggtacagaaagctgtttgcaggaactgtaatggcagtggtgctgtgatatgtaagggtctcgtggcgcttgttcacttcgtcagctccaaactcctggacctactactaccaatagggatgtaccttcagtaggaaatggaagctaatataaccaacagctttgttcattggaatgtctaaaagcctgcagtataatgccatgtatatatacagaaatagtgtctatgaataattcgatttcatctgtgtgttcaggcgacatgtgtggtggcacagggaaatggaaggccctcaatcggaagagggcgaaagatgtttatgaattcaccgagtgcccgaattgctacggtacgttctttctgcctttctagtgtttatgcaaatgcggcatgtagtttgagatgcatagcctcatgcattcagaaccaatcgtttttactcttttatttactactccctcaaaaagaatgcaattccagatttcaaacaaaccaaacttttctaaattaaaccaagttcattaaaaaaaatgagcactgtgttcttttgagaacaaagaaagcacacatctttcatgttgtttatttgagcatttcaatattttggtatgacccatctttgaagttgtcaagaactgatcatgtcgctatgtctgttaggccgcggaaagttggtgtgccctgtctgtctcggaactggcctgccaaacaacaaggggctcctgcgacgcccagaagccaagcagctgctcgacaagatgtataacggcaagatactgccgaggtcgtagagcactctttaccacgcccaggattttgttgagtcgtcgagtaggaatgacgctcggatcgatgtannccnntnnnnnnnnnnngcagcnngctnnnncnngattgtatnncggnaaagantanngccgaaggtnnnnannccctncttttccangnncaangatttttttgagtcnnnnnnnnnnnnnnnnncncctccnnnnnnnnnnacccctatcannnnnnnnnntnctnnntannnnnnnnnnnnnnncnnnnntnnnnnnnnnannnnncnnnnntctccnnnnnnnnnnnnnnatcnnctttnnnnnnnnnnnntcnnnnnnnnannnnnnnnnatnnnnnnnnnnnnnnnnnnnnnnnnnnnannnnnnnnnnnnnnnnnnnnnnncnnnnnnnnnnnnnnnnnnnnnctcannnnnnnnnnnntnnnnnnnnnnnnnnnnnnnttnnnnnnnnnnnnnnnnnnnnnnnnnannnnnnnnnnnnnnnnnnnnnnnnnnnnnnnnnnnnnnnnnnnnnnnnnnnnannntnnnnnnnnnnnnnnnnnnnnnnnnnnnnnctc

SEQ ID NO: 6348 - DNA, 655 bp, Zea mays
gctactgactgacctactcggatactaagagacctgcttgttcaagtagactctcttcgaaaggaacatagcgacctacaaaacgaatctcattatgtaagcctttttcttttagtatgtcaactaagatttggtttattggcagttgtgctgttgccctttatctagcaaactttgttatctgattttatccagtgtaaatgctttatacaaatgcctaaaccaactcatcactttgttgaatatttggcttgtcacgctacctttgttgcatcttccagcatggttcaacagttattttcatccatccctttcaaaaaaaaagttattttcatccagatttcctttccgggaaacaggtaacaatggagagggatgagatgcaggatgaaaacggcgtgctccgcaaagaaatttcagagcttcaaaacgagttgacaatgcgggtttcaggcagtccagcaggttggggccatggcaccgccagatcagatccccctcttcctcactcaaccgcagtgttctcgtcggagcaggcgatgcaaccacccaccattgcaagcgttgtattcccgttgcagcagccactggcaccatcagcaatgaccaaaccacctcatgctgcaccaccactcgaactgaagctctttccaga

SEQ ID NO: 6349 - DNA, 640 bp, Zea mays
tcacatccgtgcgcgaccaaggcaataatggtgtcgtcctcccgtgctgtcgtcgtcgtcgtcggcctcctcgtcgccgcgtcctccctcgccgtcgctgcctccggtacgtacgtacgtcttagtaccttacctgcagtgtatgcgcatgaccgcgcgttgccagagcagccaggggtagggtatgacgatgctaacaccggcatgcatgcacgcatggtggcatgaacgtacgaacggcagatggcggtgggccgacgtacgggtacacggcggggagccccgacgggccggagaactggggcaagctgagccccgcgtacaagctgtgcgggcaggggaagcagcagtccccgatcgacatcgtcaccaagcaggccgtccccaacgccaacctcgacaccctcaaccgcacctacgccgccaccgccgccacgctcatcaacgacggccacgacatcacggtacctatatatatacgtacatatgcatgcatggacatgcactgatgcacatataatataggttccgatgaatgaaagcatgcatacatgtgcacgtacgtacgattgcagatgacgttcgagggcaaggtcgggacggtaatggtgaacggcaaggcgtacagcttcgagaagat

SEQ ID NO: 6350 - DNA, 1313 bp, Zea mays
tctgttgcgagcacgtcccatcgaagaacgttaggtttctcatggatccgccaccgccattgaaggcttgaagcaaaatagaaaccctttgctgtaagttggaacttcccgtcgacagcgcaccacggacatacaagtcattagcactttatcaggaccagaaaatattccacgccaatgtaacgattaatgaacacggtggggcaaggcaataataagcagaagtgcaaactcaacattcagggatcaaataccgcaggtggtaggttcatattccggttaacaaactcatggaacgccgtatgttcatgtgccattgcgatgccacatgaacgtcagttcaagataaccagttaggccttgttcgtttctatcggattggtgggttggaacgattcctagccggattacttctctaatttatataaactttgattagctggaatgattccggttgcaatccgacgtaaacgaacaaggccttaatcatccccaacatacatcataagctacagttttcaacagagacctggcttccggttgggcgatcacttggggttcctcagcacgatgatgaccgagtcgcccctgaggaacatcttgctgatgaatctatccttgttcacaggcagagccttctttttgcccttgccagtcttggggacctggaaagaaattgagtcctaggatcattgcacttccacagattaaaaccttatagaatcatgggagtcaatcaagtctggtagcagacttcgttacctctgtccacatctcccgcacgttctcaagcaccatgttacagtggcgatcaaaagcacgaacccggccaagcagcttcttgttgttgcggcaattgatgagaacctgaatacatcaggaaaacaacaaattttagctctattgactaattacaagcaaaacacagtggctggacatcataacggtgaggacatacttaagtatcaaattatcggagagaataagaccagaagaattacatcaaaacaactgctactttgaacacagcataataagttttaaaataactgcagcattcacgaagctatacaagacagtttttttttctactgcaacaatgaacattaaggtttttgattgggagcaaaacgacagaaactagtgtgcatagcaggagctcagtcatgtatcgtgtcatttccattcaccaaaagggttttcccaaacctgtaccctcaaacttgtacgggacccaaagaacaaaaactaatagcacaatgcacataagtttctagcaaaataacaggaagggaattgtgtacctgggtgtg

SEQ ID NO: 6351 - DNA, 392 bp, Zea mays
gcctgacaaagtccggcctcgacatccctgtggaactggacaagcttgccaccccacagctccaagtggcgtagcaaaagaaggcgcgcggctcgccatacaaccggaacagacttggagtctcgaggaacagcatgcattttggtttggcactgatgcaggcagcgcagcgcagcgcaggacgcagattgaaaatctgtgatagatgaaatcatgtttttatttctgtttctaatgttgtagtgcaggcccgtgcgtggtgcgccctttctgttgtgcgttgaccgttgaaaatctgtgatagatgaaatcatgtttttatttctgtttctaagaagcaaattgccgtcgtatcttggcacgtgttgtaactaaaaaaaacgggtggaaac

SEQ ID NO: 6352 - DNA, 875 bp, Zea mays
gccctcgcggccatcgcgctcctagcgctctggtccatgttcgccgcctccgtcacgctgcgcttgtcctccgtcgatctcgccaccacgttcggggacgcgagcgatccgctcatcgacgaacttgatcccctggtacgactcatcaatcccttcccttactttctctcctagatctagccgcttacttggttgttcatcctcctcataacttacgatgtgtaaatgcgtgctaagagctttctggtattgcaaaagggaaaggaaagtagacggtgtgtttacttatatagttctagatttgaaggggtgattgtttacaagatattctaaggcaggaaaaagtgggaggtatttgtcagtttatgactcgtaaaaaaaatgtcaggttatcactgagctcatctgcccttacaagatttttcaattttcaggacgattagcagttagcaccatgctaaactgttaataaacagctacacttacatgaactttagtctccattggtttggttgcaaggtggttagattgtttcagctagactagacaaacatctcttttgccatgcactcatgcttttgggctgtaagacaagactgaaacttgcctaaccgtggttgaacaggagatggagcaaagagaaaagctagtgcgccggatgtgggatgtgtacacacgcacagataatcatgtacggctaccacggttctggcaagaagcatttgaggctgcatatgaggagcttgctggtgatgatacgcttactactgatgcagctatatctgagattgctcgcatgtcaatccataggcctgaggttgagcaatcgtcgaataaggattaggtatgaactaactgacctatttgtgacttat

SEQ ID NO: 6353 - DNA, 856 bp, Zea mays
gaagaggagatgattaaggcagcaattgaagcttcaaaaagggaagctgacgggatgaaaaatgtatgcttctgcttttggattttaattatacatctactcaaacaaacttttaagaaaacctattgtgaacaggttctaagtagtggtcaatctgaaaacatgtcacgtggcagaggtgatcatgagcttgctcgggcggtttctttgtccttggaggtagccttttaacttctaagatgtagctatgtatttttgttcatatacctatacctgcaatgtgtttttttatgtggctatcagacagcagagcgagagagagctctgcgccaagagggaatgtttgtagcagatcactctcctgacttatctgataaagaaggcggtcaaggaggaagtgggataagcgaaaggtgaagtcacatttccaaatgggtagaacagtggtagtgtgtggattattacttatttataatcaattattaatggctcaatttctgttcccctatcatttgtttttttgtatggtttcatttgcatggaagccatgcatcgtgtgggatatgatattgtttccctgtttgtgtgggtcacttctcatgcaatgtttttagcgagcttttcctaacctttgtaagtataatctgtgtctaattggaatatacttggtagcagctgattcctcatacatgtccattcttattgtaggcgaggactaactacaggagaagtgggaacttctgagcaaacagtagatgaagagaacttccaagaggacaatgaagatggtgaagaacaacctttagttaggactcgttctaggcgacttcgaggcagaactattgagccagcaaaa

SEQ ID NO: 6354 - DNA, 382 bp, Zea mays
tcagtcttgattaggagtcctcatctttcttcttcttttttacctcccatttctgggacgttttctcgattgccggtgctcgattaggtaaagagtagtagtaactagtacagtacgtagcgctgcgactgcgaggtagatgcatgtgggatcgtggacagttttgggaatccccttcttcaaggggaatggggatctgggttctttacagctgcagtgctgcgaaggagcaccgcaggcagctgagatgaaatctagtggatctcttctgttgttagttgtaccacgaccacggtaaaaaaaaacaacaacaacgtcgtcatcgcacgcccatgtatagctaaagaaaccagacgcaacagcctgctaaagatgcatgtca

SEQ ID NO: 6355 - DNA, 366 bp, Zea mays
ttctcttggagctgaccaccggcaggttggccaacgacggcggtgagcacggctccctggccgactgggcgtggcggcacctgcagtccggtaaaagcatcgccgaggccgcagacaagtccatcgcggacgccggttacggtgaccaagtcgaggccgtcttcaagctcggcattatatgcaccggtcgccagccgtcctcgcggccgacgatgaagggcgtgcttcagatactgcagcggtgtgaacaggcgcaccagaggaccttcgacgagaaggtcgccgactacgacgccgctccgctgctgcaggtgcatggaggtagccgccggaaacaactctccgatgccgaagtgatcgacgacg

SEQ ID NO: 6356 - DNA, 388 bp, Zea mays
  misc_feature (384)..(384): n is a, c, g, or t
tctcggagcacgtaagttacgaatcttcgcttcttcttgtgatagtgtttcgagttgcctcatgtttaccttgagtcgtctgccggctcgccacatggtcaaggcgcatcgccgtcgatgcccgctcgattccaccgtcagccagatttttctggctcgatgtacctgcgacgtagtgtggagatgagacgcgcaggtgacgccggatgctagggaaccggaactagatccggtccctgctactgtggtggctgcgctggtttctgaattctcatattgggatttgaatgaatccttgaaacatttataacatgccttgaccgcttgtttacttaggtctctagatgaggagggcattgttaagatttgctctggaccatgagncgtg

SEQ ID NO: 6357 - DNA, 484 bp, Zea mays
aacggccaccttttcaaaactctacaaggtgattggcgaggaaacaaaatgccaggtcccaaatattttgcatcgtcaattgacttgtaaagccttctcatgttcactctgttatatgtgaagctaacatggtaccggtttctatcatgatgattcatgtgaaactgatggtcaaattgtaaaaatatctcatcagcttcaaccctgtgaatgaaaccctggagacaaaccgacgtgtcattattcattaagagcatatgaacctatattcaacctttaagaatgcccaaaagatacacaattgtcaagtgaaggggactaacttggtaagcctgagcatgattcccagcatatctagcaactacgaagtctccttggactagtgatggccttttttctgccaaaccagggacctcaagagacaaaaaatgcatacccctccttctcattaagacaccctccatgtcatatgttctcatctcct

SEQ ID NO: 6358 - DNA, 397 bp, Zea mays
gttctgaagaactgggcgccccagacacaggtgctgcggcacgaggccgtgggtgcctttgtaactcactgcggctggaactcggtgctggaggcggccatgtccggcgtgccgatgatctgctggccgctgtacgcggagcagaggctgaataaggtgcacgtggtggaggagatgaaggttggggtggtgatggaaggctacgacgaggagttggtgacggctgacgaggtggaggccaaggtacgactagtgatggagtcggaggaagggaagaagctcagggagaggacagcgacggcgaaggaaatggctgctgatgccatcaaacaaggcgggtcgtcttacgtcgaacttggtgagtttttgaagggtttaggacgcaagtgatggatag

SEQ ID NO: 6359 - DNA, 498 bp, Zea mays
ttttttttttcttctgtgcgttcaggttgaagcgcccagggtgcagccgaagctgagcgagcccttcttggggttcacccagaccgcggagatttggaactccagggcctgcatgatcggcctcatcggcaccttcattgtggagctggtaatggatgcgcactacctgtcttcgcgagcatgtaacgacgtttgaggcgttgcttctgttcctacttgagtttcgttctcaatgttcgatggaccggcttcttaatttctaggtgctgaacaaggggattcttcagatgattggggtggaggtgggcaagggtctggaccttcctctttgaagggtgaccaaatagtaacattatcgtttgctggtgtattatgctggccgaaaaacatgaggggtttcacttgctttttgacttggtggctacatatgcatgttcatcatgcatgtccttggatatccggatgttacaacaccaactgtgtttaatgacttggagg

SEQ ID NO: 6360 - DNA, 373 bp, Zea mays
tacttggacttgtgcgcaatctcaaatcctggaatattgtctacagcttcaaacaaaccagctggcaaaggtttgtttgctgcctccttgatggcactggctagtgtttgagtggcatgctgaaatgcttcaactaagaattcagtaccattgtcttccctcttggccttcttggatggtttagttgcagatgttgctgcagtgtcattctcatggacagcactagatgttgcaatacacccttccttttgcacattttcaccatcatcaacagcaagagggtcatttgatgtctttgcaaatcgtcctgatgcaacactattaccaaaaattgtagcaaggttgccatagtagggaagaggcttgtttattt

SEQ ID NO: 6361 - DNA, 912 bp, Zea mays
  misc_feature (898)..(902): n is a, c, g, or t
ctctcaactctttcttctttctgtagcttgtctgtagtaacgtaagtcatttatttaatataaaagacgaatcagtttgccttccattatacgagtttgcctaatatatccttcttttaaaagatctcggcaggatgtaattaagaatcacacattggaatggattgagaagtattatccaggcttatttgagcagatccatttcgggaatcattttgctttggaaggtcaatcaaggccaaaatcagagatttgcaggtaatacactggggaacatagtgtcccaatcatttttaggagactggtaagtggtaacatagcttaacatgcactgaagcataagagcatctccagaacacttcaaataccaccctccatatcactgtgtggctatccactccataagatcccctttccatatttcagcacactagcagactagcaaaatctcgatccgtaccatgttgatctatgttttcttggtattcaaattgccatgaatcgaaagtttttttttcttgattttaagaattaaacggatactgtttaagttcaaatacttcataaaaacagccaattctgaagaatcatagcttaaagtccagaagatattttgagttaaatctgattagaataggttctttggtaattatttctatggacaaataggtggacgtgatgccaggaaattgacatattcacattttgaatttattggcgggaggggtgggggaggaacttgatatattcacaatctcgaagtaaaaagaatgtgaataagcatggtcctagctgtcagcctcacgtactggaatatgccgtttagcgaagcacgcacacaagcgaagtttggctggccacccttgcctgataccgtgtcaaacagagatgataaggnnnnnagctaatcca

SEQ ID NO: 6362 - DNA, 408 bp, Zea mays
aatcatcctccatatagtaatcctcttcttcttggatttgttggggttctggttctgatatttgcagagaactacttgagctggaaccagcttgatcgctggaagaaccctgtaaaacagtaggctagccagtaattataccaatcaaagcattaaaagaatgcacgaaaaggacaggcaaagtccttctgttccgccatccagaaccctatgtttagttagtcgtgtggacgatggactgattgccagttagtagtagtataaaaatatgaatagaacaaatgcatctttatcataaaggccaaaacaactgccgcaatgcttatcgcaatcctttgcaggataaaataaaatcacagggaacagggaagccatctcctgacagtgttcaccgatccgctagattaa

SEQ ID NO: 6363 - DNA, 355 bp, Zea mays
ccgcgaagcccagcggagttgcggcgcagggcaaggagccggcgcccaagctcagcgagacggcgacgaagccgtcagccgcgaagagcggcggcgttaagaaggctgagcagaagccccgggaaaccaaaaggaaggtacgtgctgtagtatatcactgcacaggcacagctgcgtcatatgtctatgctatccttgtgattaccttgtgacctgttcgtgtcgtgatggcctaaaagtacgtgcttcccatgatgaaaccaggtgaagagcagcaaacaggcggcggcggccaaaaagtgacgtacagtacgtgtggagtgtaatggagcttccatgcatgagtgaatccatg

SEQ ID NO: 6364 - DNA, 355 bp, Zea mays
tattattttttattattttctctcctgctttaatgctctcgtagtcttgttcctttagcacctcgatcgagccttatgttcttccttccgttcggggggcggagatttgcaggctagatcgatcgtcacggcgcttctgctgttccaatgtaacgtgagcatctctagtatacaggaactggagctgtagtttagctagttgctttgcttggcgccttggcggtgctgtgcgtctgcgcccccttgtcttggcgcggtgcgtgagagccgtcctcatcgcgctcgcgcatcggagtgcgattcgactgctgctcctcttgctactatttctttacattttttccccctccactgt

SEQ ID NO: 6365 - DNA, 814 bp, Zea mays
tatatcaggtttgcaaatcaccaagtttttaagtagtatgttatatatatacttaaattttacctttttaagaagtcacatgaacttggcaatggttttgttatacatttttattgataaattgttaccaaaatgctaatttgaattatcagtttggattttgagcaacttatatttgccaccttcaggatcaatgtacattttttgagccactcaaatattatgattaattgattatatctgaacaaagagggatggatggtgggtagtttagttttattagaaaatagtgtatcctttgttactttctaaagaaatgtcatttgtttttttatcaagcaggccaatcatttggttgtgatataaatgggaatttatattgcttttatttctttcagcgatcgttttctgcctgacaaagccattgacttgattgatgaagctggatctcgtgttaggctgaggcatgcgcaggtattttaagcgatgatttttcagactacaaacatttgctgcattgttcctgctgattttgagctttggtgttacagctccctgatgaagccaaagagctggacaaagagctgcggcagataaccaagcagaaaaatgaggttgtacgtggacaagattttgagaaggtatactgttgtttggcacagcggcggcaacgccgatctgctcccacctctctagcaacgccgatctggttaataccaagcattatgttgtttccttttgagataaatattttgttactgattttaccttttgtctcctcttcttgttttttgttctataatctgtagcaaat

SEQ ID NO: 6366 - DNA, 799 bp, Zea mays
  misc_feature (793)..(793): n is a, c, g, or t
caaggtatgttttgtgggattactctggatattttttaaggtgaaaaatggttgatgaatagtatttatatgcagcatatatcccttgtcaattctacagttaatttgaatatagaagggagcaaatacacagtaagtttgacattccataagggaatttattttagttgacaataaagttagattggcatcatcctgagtttcgtctgcatcatgtcgtagattgaaactgtaaggactggacatggtagctacaggttgagaatgaatgattcaacagttgaagcgaatgtacaatctttatgtgatggtggcctcttaatgcaggtaactagttcttttttatgctttattattaattagttggataaatggtttcgatttctgattgttaaactgcaatggctccagttggatggaaacagccatgtaatttatgcagaagaagaagctggtggtacacggcttcagattgatggaaagacatgtttattgcaggtaaatactcccttcttcctttatattcttgttgtctgattgtataactttgctagattatttgtataatttattattgcatttcaccccactaacttatctttaaaagatgggttctgttgtttgcttcagcaggcgacatcacataagaaaattgtgattaatctttgttttcttgcagaatgaccatgatccatcaaagttattagctgagacaccctgcaaacttcttcgtttcttggttgctgatggtgctcatgttgatgcggatgtaccatacgcggaagttgaggtnatgaaa

SEQ ID NO: 6367 - DNA, 361 bp, Zea mays
ctcggcacgatttttcaagaggacgacgacaaaggtggtgcttcgctagcctgcgccatggatggagatcaagatatcgactgggatgaccggctgcatttcccagcagctgacaaggaaatcgatatatccaagcacatccgggacatgattcatctggagatcaccttggatgcagtgtgcaaccccaactgcaagggtctatgccttacctgcggcgcaaacctcaacaccaccagcagctgcacatgcaagcccaggaacgtccaaggactttctcctctcaaaggggttttcaagtgatgatgcggataccaaagtttgtacaaccagcccaacttcatgtcatgctgtgagcctg

SEQ ID NO: 6368 - DNA, 509 bp, Zea mays
  misc_feature (495)..(507): n is a, c, g, or t
caggaactgaaaagcatgtcatgatctgttcggccattgaaatgaaacttgccatcaaacctctttactatggacagttgaatggaagtataaagaccttgtgtagttgtgttgtaccatgaatattttacctgaagaatggtttgtggagattcatgtggcacattgttaacttcaggggacaggctcccacggccatcagggctatcctcgtttgatgaaggtgaagaaatatcaaggcccaggccactgtagatagctgcattatttcttgccaaaacattatcagagccaacttttatccggactttaagtctgttttggtcactacattttgacggcccatatgaatcatgggagacggaacccctttcagactttgtggatgggcgtatttcctttttagttgaatcaccagaaaaaggcaccacaggaccattactttggggggtagatgaaactgccacagctggaggtttctgagacaagtcctcnnnnnnnnnnnnntg

SEQ ID NO: 6369 - DNA, 397 bp, Zea mays
atgagactctggagcattttatgctagttaaatatacaggcaatgtgtttcctacatggatgatgaacaaactgacttcactcccataccttgtcaatctttgtttgttccacctgcataactgcagtgctctccctccaattggccatctacaaaatctgcgttacttgcatattaaagatatgcccaacctcacaaatctagagatgggtctttctgggaggcctgtgtctttggggaaattgactcacctcaaactggaagcactgaatttagaagagctgtctatactcttgtcagccaacaatgagagtccctgtttcatgtttcccaatcttgaggagttatctgttctatcttgctctaagcttgtcttcaaaccatctggtgcctaaaa

SEQ ID NO: 6370 - DNA, 488 bp, Zea mays
tgtcgtcttcgtcctcgccttgctccttgtggcctatcgtaagtaactaaatcaaagttttcgattatcaagctccttttgagactctactactatatatcaagctctgttcaagattattatccatgctgatgagcggtttatgattgtacgtacgtactaggtgcggaggcaactgtctgcatgaggcataacaatttctatcacggtccatgcatgagcaacaaggactgtgccaactcgtgcgttcaacataacctcggtgtcggcgggtattgcaggggcaagatcccatttaacaaagaatgcatgtgtacatttgaatgcccatgagtcaaaagccactatatctgacgggcgcaacttgttatatatctagggatgggatgtcgtttggcatgtactccattttgaaagtgtccaagtgagactttatacatatatgcagttgagagatggaattaataataagagcaaacgcatatgtt

SEQ ID NO: 6371 - DNA, 617 bp, Zea mays
tctcgccctgatgtcctggccgctgctggcggattcttggctatcttctttgcttgcttggttgcagtgtatattggagcagtaggagttgctatctttgccatttctgccattgtcatctcatcagttgttggagttatgattactactggtaaaccatctttattcccctgtacaagattgtattgctgttggtatgttactatgcaaacaaccttcaggcataatataaatcttaaatactttacctgaatctccaaccattgtagaagatgttctgtacttctgtatctgaagttaatttggtcaacgttaatatggtgaaactataagaaatgtttcttttttttccaactgaatcatctcaatctgtacacttgcctgtgtaataaagctagatcagaaaattagtaatgcctagttcccacaaggtgcctgcgttctcgcgttagcatcagaaacgagtcatgcactagaatgtttttcaacaattaaggagaaccaaatgttagttgcctatttttatatgcttaacagtaaattgtcaatagtcaccaactatttttatatgcttaacagtaaattgtcaatagtcaccaactcttaaccggactcgc

SEQ ID NO: 6372 - DNA, 1323 bp, Zea mays
  misc_feature (1313)..(1315): n is a, c, g, or t
gcgcagcggcggcggcggcggcgtccatggcgaggaagcacggatggcagctccccgcgcacacgctccaggtgcggtctcggtgcctttcctctccgcttccgatcgtcgcgaatcactcaccggctgccaccgccaccgccaccgcctcctacttcgattcctttttacctgcggagtagtttcgggatcgtttcgttccggtatgtgctaggaggaagagatgtgtgacatcaacattgggtgcaatgcagtaccccgcgagtccgcgacgcggcgacggtgctccggcctgctgcaaattcttgtttttctttcttcgcccctgtacaacctacgtattacactgtgaacccattgatcagtaccgggacttggtttccttctcaaagcccgaaacacctgcagacccactgagtacgtttggcttcatcatgttgttcgtttgacgattaaacctgccctctcatagtctcatggcccgggtcatgttctattttaccctgtcgatagtgaatcttcttctttttatatatattccacagatatgaaaacatgctgctctagtggatattgactctgactgattcctaaaaggttgatcctgttaatataactattttttcaatacttgattggattaaacgaagatattctcgatactgcgtttgggctagtaccgctgacaaaatttcagactaccaatgaaattaccaacttagggtccaaaggcattgtaaccaacgtataaaggtttcggtatgcaccttttgtttttcaacattacatattaatatattatattcccaagccagccttttgcttcagatcatcatcctctgatgataaaacacagacttacccaagccatgctgttttttccctccttttctattttgtggaatgacagttctcttaatatctcatggaacagatcattgcggttacggttttcttccttctggtgattgctttttatgcattcttcgcaatgtttctagggaagcaagtcctagagtatgttgtgatcggtgtctacactgccgtggtgagcctgccaaaccgcacctgcattgtatttctctgtcgttatttgaagcaatttatgtcttcatcataatttctacctgtatgtgttcggtcaggtgttttctgtcgccatgctttacatccgctgcactagtataaaccctgctgatcctggaatcatgtcaaagttcgacaatgtcctcatcgatgcacctggaagtgctgccaacatacagggcacggatttgccagtgaaagctggtatggcgctggaacaatctccnnnatcggcaa

SEQ ID NO: 6373 - DNA, 871 bp, Zea mays
acatgcttttttattctgtggggggagtaactgtcccagctgagggccgttgcaggcttcacatcagttgttggaacaggtcatgcaagtccgatgctggatcctctcacttcgagtgaaacttgcggctaacagactcgtagctaggaacatgaataactgcaataaaagcaattcagttagtcgccataccttgtcgggcaccaatgcaccatgactactcgaaactgctgaacataccgtcgccccacgatgccattgtgagtggtgtagacatcatctcctttgcggttgacaaaatgtcattcaaagtgatctcctcaactgttttcaggaaatactcgatgggcttcctgaaatttcagaaacatagaatcagttgaagatgacaacagatctactggactctggagaaatggacacaactgctgcatggatgctttggatctgattggactcaaaaagactataccaacttaggagtaactaggttgtctaagcatacatccacacccctcaacaaactgagcgagactcagatatctttggatgtgcttgtacttgttgggacccaaatagaaaatcttccagcatgactatattgatatttttgcgaggatacggtgcataaatgtagcagaaaatagacctaatttatgtactagcacagcaatactctcatacctttccccataagtaagaacctgtcttccaatatcttcagatgctatagactgcagaagaggaaaagtgtgtactgtaaagaacactttaggaaaacgggtcatacagttaggatttgatcaggagcaagaacagtgtacccttgattccaagttcatcagaactgcagatttggttgcctctttag

SEQ ID NO: 6374 - DNA, 366 bp, Zea mays
cctttaggccttgttcgtttgtgccggattggtgggtcggaacgattcctaaccggattgcttctctaatttatataaactttgattagctggaacgatttcgggtacaattcgacacaaacgaacaagaccttagtcagctgttgacattcttttccccctcataagagaactgtacataccaacaacggtcgctgctgttgtactaccagtagtatgcaatgtggaaccaataagctttgtatgcagcgactgaaactcctacatgtgtaagactgatcagtaaggtctcgctgggctctggctcggtggcgcttacaactttgttattttgccatatgatgattgtgccaaaccattattctt

SEQ ID NO: 6375 - DNA, 1210 bp, Zea mays
  misc_feature (1141)..(1145): n is a, c, g, or t
  misc_feature (1165)..(1167): n is a, c, g, or t
  misc_feature (1178)..(1179): n is a, c, g, or t
ggttatatacaaggttggtgttagccaaattcatgtgaataagcacctgcaaattctttctccttacagtggtaatatgattgttgcatatgtgtattttcactaaatacagggagggacaagtactgggtataagaaatttgtctcagaaaatggcattgaagatgatacttattcagaaaatggggttgcactttttcgagttcagggctcagggccagagaatatgcaagctattcaagttgacacggtaatttatttttattgtcttctccaaacaaggcattatggttgtgttatggccttcttatcttagtggattcctttctaccacattgtaaaagctatgacaatgctatgattcttattaccaggcagcaccgtcgctgaactcttcttattgttacatattgcatgacggagatacagtatttacatggatcggtaatctaagctcatcaatggaccaagagcttgctgagaggcagctagatgtgatcaaggttggaggagtgctttttagtgattgtgttggcatggttgaccattcaaatgaacagtctgctatgttgctgctgcacttcgatgaactcattatccacatgacaatttaggctttagctgtgtttcttctttctgttatttctagattgatgtccgccagtgggtaatgactagttactacaaccatctaagctaaagattttcgcagaacagttatatagtagattgctagttactgcatttatgatgacttaataatcactacagtcatttatatgatttctactaatatgttgtacgtattaattgaatgttatcttcagacttatttgcacaccatcaacatcatacagtataatttacttatcctaatttcctagttactttttgcatctgtttcctgtcaagtgtacatcatgttattactagatcaacagtccttgtttggcagtaaatcagttcatcacttgtctacttgtattatgacataaatgcttcctgttcccaacttgcatattagcttgttgattgcttctgtgtaactatatatttatactctacctgagcatgtttctgtcctggttgcatgctcactgctctatcatataaactactacaacactgaacctttccattnnnnncatccactatatgcagccannntttgcagtccnngaatgctcaaagaaggatctgaatagatcag

SEQ ID NO: 6376 - DNA, 507 bp, Zea mays
ctctcgtgtcggtccaggagcaggcggcggcggacgaagaggagcagcacctcgccgccgtcttccaggaggcatcgctggcggccatcgaccgcgcgatgcaccgcgacatttacctggtacgcattgttacaactactcttctaggcttattttcttctatcaaaagcaagctttatcagcatgtatttaatatagttaattgtatgcaaacataatacaggccgcggtttatgcgagcaagcagacgcgatgccactcggtcgggtgccaacaagtgaaggactgagaactcgatcgacaccagtagattaagtgggcatgacgtcaataataactaattaattacgtacctagccgcttgtactagtcatgccctactttatattactttaaaagatacatttcgttgtgtaatcatcttatggttcatcatcgtcatgtgctccactatatactgtctcagatctatattcatcactggcagatctcaatctagctagcacc

SEQ ID NO: 6377 - DNA, 376 bp, Zea mays
tatacacccactaccagaaaagcagcagcccccccaccacaaagtgtatggctagctagtgcactacagacccggaaagaaacattatgagagcatgccagactcttttagcagctccctctctccatcactcacactcatagggggcattgaaagatggaggagcatgagcaggttattgcttaccatatccttgcaattaaagcacctttgaacaaaagatcggaaagggaaaggcgatatcatataccatttggtacaacttcaagtggagaggatcttttaggtctttttttccctgcctcctccttgttagtgaatcgaagccggcatttctatcttacgctttgattggtaggttaacgcctgctaacaa

SEQ ID NO: 6378 - DNA, 393 bp, Zea mays
attaacttagagcaatatcacaagtgaatttggagaacttaggacacaacaaaatcgcacgaaagtaaatgcacaagtgagacatgcgattttatctcgtggttcgaccaagactgaaatggtcgcctacatccatgttgtggtgtcctcttggacaagggttgttttcaatccctttcaagtgatccaaagatcaaacttgagtcctatagtcttccttatatcaatagtgtcaggtaccgtaattaagggtacccccaatactcctaagcatggctggagaacatcttgaaaacgagccgtaaagaccggtaagcgtggttcaaagttaaagcctcgtctgccaagggacgcgatctcgtctcgcccgagcccggcctcgggtaagaacag

SEQ ID NO: 6379 - DNA, 388 bp, Zea mays
ccactcatagtgtcatcctcttgatgagagttagagtccctctacttacaggaacgctactaaaactaggttttaacactacgggaacgagattgttcccacattcctgaaaaaagaacgtgatcaagttccacgtttccggtttctaaggtctctaaccactgcagcttatgttggtttgcagcttatgttggtttgtgttatagaaagaaactgtatatgagatatagaaaccgtagcaatgcacggtcaactaaatagtcaatctcaatctaggaagaagcctatcacattctgacattaaatataaacatcgctaaaggaaaaacaatatactcaatttacgtctttaagtgtatacggcgcaccctcaactttctccaataga

SEQ ID NO: 6380 - DNA, 712 bp, Zea mays
  misc_feature (703)..(709): n is a, c, g, or t
tgacctcattcatgttattactccgaaaggaagaggtcagtggtcttttctgccccttgatttctttttccgaatgcatttggaattcttttcacaaatttcaatctgtcaaaatataattcactatgcgcctttgcatgatttatctttctttccctactatgactaaacctggagctaaacaaatggacagtcgatgagacattttgattgaaagtttcctatcctttttttcccttttgccacatgaaatgctcattgttgggcagttgtacacttctacttccctggttgagaaaaattgttcatctttgtacagttgtactggtccctcttacactgttctcaatttacttctcatgtgaaacagcatccgtgcctgattcagtgaaggcagaactcctgcaacgcatccggtccttccttatgtctaccacacttcggtagtcatttgtcgcgacggttggagcctatatgtaccattgtaggatcattgggaagtcgatcttgttggggaccaaagggtgcaggaaagcagtgcgtaggggaatattgtgagcatgaaaagaaacagtgtgatcttcatgacactgtcgacatgttcctcgtcaggcgcaggcggttggcgtaatttcaggtgtaccaatagagttgtaagttgtaacccctgaatactgtattgttaaagcaaccttccaccttnnnnnnncta

SEQ ID NO: 6381 - DNA, 450 bp, Zea mays
aacaagccagaggttggatagtttcatatttagcacattcagtaaaatttgttgttgagagctgcgactttggatcatgggtgatcttaatcggttgattcttgcagtggattcctccaaggttggaacaagttcctgacgaggcagttgagcaatatttcttgagaattgatgatccccagtgggaagatctgaacctgcctgcgagacttccccaccgaagaaatattgagtccaagatttgattgaggtcttggacgaagagtgagcctcgatggatgctagtggtcaggataactcgtcaactcatgtttgaagttgtgtgcggaatgttgacgacgattgataaataataaacgcggactgaatatatgtcttataagttcacgtttatcgctaaataatttttgttgcttttgtgtgaagttgtacctgttagccttgttcggt

SEQ ID NO: 6382 - DNA, 369 bp, Zea mays
tttactttttattcaacaatgacaggaactttgttaaacaatgttttcttgatgtaaagatgcttatcgccgaagcagaagattaatatctgactttcaacgtacaggagatacaaagatacgaagcagcacattcctcttcgctatcagagattaacaggcccccttcaagaacatccaaaggcattttatgatgcatttgattattgcgatgtatgatatgtttcccagaagcatcatcacaaatatgttggggctttggttagtctccttgatttttccaaaggaggttgcatagggtacatagagtgtaatattttttgtttcgttcctagattttgtcaagagatggcaattatttattggaga

SEQ ID NO: 6383 - DNA, 586 bp, Zea mays
  misc_feature (357)..(371): n is a, c, g, or t
  misc_feature (389)..(393): n is a, c, g, or t
  misc_feature (402)..(402): n is a, c, g, or t
  misc_feature (404)..(407): n is a, c, g, or t
  misc_feature (426)..(432): n is a, c, g, or t
  misc_feature (435)..(435): n is a, c, g, or t
  misc_feature (457)..(458): n is a, c, g, or t
  misc_feature (460)..(463): n is a, c, g, or t
  misc_feature (481)..(482): n is a, c, g, or t
  misc_feature (490)..(491): n is a, c, g, or t
  misc_feature (531)..(536): n is a, c, g, or t
  misc_feature (540)..(541): n is a, c, g, or t
  misc_feature (544)..(549): n is a, c, g, or t
  misc_feature (552)..(555): n is a, c, g, or t
  misc_feature (578)..(583): n is a, c, g, or t
gatgtcagccggcgctgctgcctctgaccatggcccgccaccaccggtgcgcgcggagaaagagctcatgagctagctacccagtcgatccacgcgtgcccgctgtgcagtgcagcccgcccgccttatcattaattaacatggagggaacattgcatcatgatttctcttttttttcggattatgtggatgttttcttctttctttctttcttcttccattgacacgtgtgcgttaattctttttgtatgttgattttgggatttggttcactgtgcaaattgtggtaaagtcatcagggaaactgatctgttgtgtaaatcacttttttgaagcattacattctgggggaaatcnnnnnnnnnnnnnnnagaagagggtgacatcgnnnnnaaatgaatntnnnnagaatcaatgcaaattgtnnnnnnnagnagaaggaaagaagaagaaaacnncnnnnatcggaaaaaaagagaannatgatgcnntgttcctccatgttaattaatgataaggcaggcgggctgnnnnnnagcnngcnnnnnngannnnctagctgctatgagctctttctnnnnnnacg

SEQ ID NO: 6384 - DNA, 595 bp, Zea mays
acacggcgcccccctggtggtgttcgacttcgacaagaccatcgtcgactgcgacagcgacaactgggtcgtcgacgccctcggcgcgacccgccgcttcgacgagctcctgcgccacctcccatggaaccacgccatcgtaagtgccggcggccgcgcgctactgtggcagccagcaggctgcagtgcacacctctttcgcctccctcaaccgttggttaataggagctagcagcagcattcctgtatatgtatataatatatatgcacgcaggatgcaatgatgggcgagctgcactcggagggcaagacggccgaggacatcagaggcagcctcagaagggcgccgctgtccccgcacgtcgtcgcggccatcaaaaccgcctacgccctcgggtacgtacgagctgcgcgcctgcgcctgcgctgccctttggccccttcccttccctgcgagttctctcttgatcctccccagatcctcctcttcttcaggtgcgagctgcgcatcctgagcgatgccaacgccttcttcgtcgacaccatcctcgcgcaccacggcctcgccgactacttctccggcttcgaggacaaa

SEQ ID NO: 6385 - DNA, 394 bp, Zea mays
tcacagcagctgacgccgccaccgactccaaccttctccagatcgaagccgagctggacccccgcgtgtcggcgctcgaatcctcagtgcacgccctcgatctgtggtgtcctcgcgtggattcatcgatcgaggggctccacgcgtcggtggatttcatcagcaccgaagtgtccaagatggggattctatggaaccaagacgtgtgtgtcgacgacttagccaggccgggcttgttcggagcacacggatcggcggcgtgcttcgacgcgtccgccagcgcgccgtccatcccagcctcggtcatcgccgacaactggggagggttcttcgatgatggcgagcagtactgcgcggcgctggacgcgctgcccaacagcatccactcagacct

SEQ ID NO: 6386 - DNA, 362 bp, Zea mays
gcatcagatggtacctcatagatcctcaactgtggctttgctggatctttgacaaacacatactttccctcttcaaacttcatgcagatgtccacaattgacttgacgattccccacatgtttgcagtgttgaggttgatctgtgcagcaaaatcccttggcttgtatcccatcacagtgagcacagaatggttgtactgatcacgggggttcacccgtgacacatagcccaacttcatcatgtcagcaccagcaagcaaagcctgggcagtccagcgagcaagtttgttggcattgttcttgagctctgtagcaaggacagctccacgctgggtctcaagcttctgcctccagtcaacaca

SEQ ID NO: 6387 - DNA, 606 bp, Zea mays
ttggttctgcacaagtgaatcaaccaccttcagtggtagatgaatatattcttccagtgaagagggatactttgtatcttgaacgagaacctttgttagatcataacattcatcgctcaggcgtatcactttatgggcgggatccagccttgtcaacactacgaccacctggaatacatggtgctggcccgctacttacacaggtttgagttatctctggctttgtttgaatcttcatttcttttcacaggacattcggtgaataagcacaattgaattctttattccctggttattgagcatttcatacaatgatcctttttacaagttacttaataattcctactaggaagcagagcttctctctccctttttttatcttgaaatattgctgtcttgctgacaagaactatcatatgcagataacccaaaccatgcaaatcccacttacctatgctgaagacattataggagttaaaggagcaaatattgcgtacatacgagctaatagtggagctgttgttacaattcaggagagtttgggtagtccagatgatattactgttgaaataaaggggacatcttcacaggtacaggcctgcacag

SEQ ID NO: 6388 - DNA, 431 bp, Zea mays
cttgtatctacgtgtaaatcacatttatgtcaattctgatgatataaaggtcagtatagtgatagcctctctccaactccaataagttgacacagcaaaagaaatgttaaatggttaccaactggcattcgttctgattgcaagaaactggctacaatgtcgctacaatgtcgctacaatgtcagggctcggtggctgagtccgcagtggatgccagcagcgatgtggagattcatggcgagctcgagctcggtgccctcacctcttcgctcgagcaccctggcggcgcgctcggcgaactcaagcacgcgaggcggcgccaccctcgcccaataccatggcttgaggaggaagggccccagatccgggttctggagtgagtcgttggtgtcggtggggaaggcagcgtcacgaacacaatgtccacgtta

SEQ ID NO: 6389 - DNA, 359 bp, Zea mays
tgttcctgtggctgctcggtaagaccatcggcttctcgtgaagaagacggcgatgaaaagaagagaggtggcctgcgtccaacgtccggatggtcgtttttgagaggtttcgcatgtcgcggttgccctttttggggatggatttggatgtgctttgtttttcggtcatcgtggaagggctttttttcgcgtgagcctggctgttggcacgggagcgttgcgcgtgtacacctcaacgcctgtgtatgatagcgattttgtatgatgtgtgtgtataaattgtgaaccgtaattgtccttgtaaatgagcgttgtacagtcgtacactggtaatgctgttttttacaatctcgttgtaa

SEQ ID NO: 6390 - DNA, 677 bp, Zea mays
  misc_feature (6)..(6): n is a, c, g, or t
atcttnaaaactttactgagtaatacattttggtgccctgtcacagcttcaggactcatttttattttacattttattgttgaaatttaggtttcttcaaaacaggaggttgttgatgctcttgttaaaggacaattttctatggacgttgcacgggtatggttaacagcttattgagatgccctttcaggctactctatcttgttgtctccaatgaaacagcagccaacagatattccttttttttgtgttgtttctttgtttcagtgggtggctacaaatctacgtcgaaccagtccattgggtcagcgaccatcttcaagcttctcatggacttttgatctaaatggcatctctgagatgtacaagtcttatgaggatactaacttatggtaaatcttcagcgatgccagttgagatcatcaaaagaaagtatgttgtgtgactaatggaatgctgctccattcaggaggattgtagagaatgtaccaaggggtgttcatattaattttctaaaagctgaacgaagtttgcatagatgggctctcgaagacctccaaagaatttatactgcggaggaattagctgcagatgagggtggaggagttgaaatgcacgtgcttgaagatgctggacactgggtattttggcacccgccttttttttctttttttttt

SEQ ID NO: 6391 - DNA, 375 bp, Zea mays
tggcttccgctgcgcagaagaagatggcaattgtttgcttgatgctgctggccgtcgtcggccaaatcgtcgctgatgctgatgttaccgtagaacatcccagccgcatctgcaccgaaacggtgattgatcctcgtgttcccaacaacgagtgcatctgctccaagaactgcgcctgtgccggcaagtgcatccttgagtcgcctgatgctgtccagacctgctttgtcgactgcgtcctcaagaacgactgcatctgcagcagcaagatcatccccggcgctgacgacccaaaggctaatgccaagtgaagtagtactgctatcatcatccccaataatggcgtacgtacctaaataaacgacctcccatgca

SEQ ID NO: 6392 - DNA, 860 bp, Zea mays
gagataagcaacacgcgcacggcacaagagaacccaattctgaattgaatcgcaatacgccgcagtgacagtcagatcagatcatttcttttttttcttttttcttttcttggaatcatggaatgggacgttggaacggagaggaaggaatagatggaactgggcctaagaaacagaagatccaaccaagagcaattaccagtacatctagcgacagctggttgaagaggttgacgccgtcgtcctccatgtggaaccggacgctgcgctgcttgcgcagggtgcgcgtcggcgagtgcgggctccgggagcccggagtcggcgagacggcgactctcttccgcccaaaaattattgcgccgctcccgcagtttgagcagctcaagctcctggcaagggagcccttcttctcgtcgccctgtccaattgccatttcacctgttgctagctataaaccctcctgctctccgcgtctggcgattcaaaaaaaaggatcacttatccagccggaagtcggattacctgcatgggattggagataagagtcagcacccggaaaatcaaaacgaaaagcgaaaggataggcggaggcaaacagagccagcggcgaaagcgaaacatgccgatgcagaaaccgcaaccgagaatcagcagcaagatgacgaatcattcagctgtaatccaacccccaacacctctcagcaaagcatccccatccaaaaaaagaaaacccagacaggaaacggagagcgaaacagcaccatgaacaaagttggacgggtatacgaagaaacgaacgccaaatcgaaacagggttggagatcgggagaggagaacctacctattctaccgctctcaac

SEQ ID NO: 6393 - DNA, 736 bp, Zea mays
tgcatgcagcgcatcagttggtcgcttgtcctttacacagtgttatttccatgctctgaagtgcacttgattgaatcaggtctttgaagttgctccttctctgttcatggtcgatgttcgaaaggttgccggtgacactccggaataccacagggtctgttctgtttgcatctcacaccctcttactgatcatgttgttggacattgactaagttccactctggaatatgttgctggcattaataactaagtgctagatcagacgttcttttctctctctctccgttatgccttgtgaatgtgatttcagtcttgtaatgactgctaacctgcgtcttaaaccgattgcagttttacgagaacctatgcagcaaacttggcagcataatctggaggccaaccgaagtttctgccaaatctacgccgctgaggacgaccacctgctagccgcctagcccagcactgagctactgtagtggcatcaccaagagacgtgattcgcagccgtcagaaaggggggagcttctgttgaatctagcattgctcgtggagctgggattcatgttgacttttgcatctgctttctcaggtgatgatgtatgtttacagccttacaccaccaggtgtttgtatattgtagtaacgctattgtagatagtctgtatatatagctccatttgtgcagttgtacgtagcaggaatatgttaaaaaacaacttttaatgtcaggtataat

SEQ ID NO: 6394 - DNA, 510 bp, Zea mays
cccgccgagctgctggactcgcccgtcctgctccactcttcctcgaacttcttcgcgtcgcccaccaccggcgccatcccggcgcagaggttcgactggaagcatgccgccgacctgatcgcgtctcagtctcagcaagacgacagccgggctgcggtcggcagcgccttcaacgacttctccttccacgcgcccaccatgcccgcgcagaccacgtccttcccttccttcaaggtaggaaataataggaattgaattgcttgttgctgtatcacaaactactaaagctaccaaacagaagcaagtagctgacagtggtcgtcgtgcaggagcagcagcaacagcaagtcgaagaggcgaccaagagcgccgtcccgtcgagcaacaaggccagcggcggcagcggcggcagcaccaagcttgaggacgggtacaactggcgcaagtacgggcagaagcaggtgaaggggagcgagaacccgcgcagctactacaagtgcacgtaccaca

SEQ ID NO: 6395 - DNA, 369 bp, Zea mays
ctgctcgtgcgcttcttgcaatccatgactacttttcacgtttgcgcgcactgagttctctttggcttgctaggccacgagagtaacatcacccccgttggggtcactcgatgaactgatctgtgaatgtgggactgctggctgcaaactcgcaaagcatttgcagatgactggaggatcagtcctctctgtacaagttgtattaacatcttctggtctcatattgtgctccagtgttgtacaatttagggaaaagcttggattaacttgtaagttatcatgaatttgttattggcatattgtacaattgtattagcaataaaaatagaagtacataagtgctggaagcctggaaggatatccagaatc

SEQ ID NO: 6396 - DNA, 599 bp, Zea mays
tatatcatcccgtcaatttccgtggtatgtttattctatgatttaccgtgaaatccatgcgagtttaatgtgatttatcacaaagttgtttccgtccaacctgggcagccgacgaatcaaccgcggaatgtaactgttgtcgttgaaaacccaatgacagtagatgacaagggaaaattggtgagcatgttatgctaataacggtgcctctgctatgcccgacaaagtagtgaaggctgctgattttagttttcctctgtattgcaggtgagcaatgttgtagtaggggttacgagcggcgggaaaaagtgacggcatatcacaaccgtgtgtagctttgtccaaactatctaaaaagggtttaagaatacataccttgtatcatactgctgtttggcgatcggctgctcgacagaggaggaattcccctccctggagagtgtagtggcaaagcagcgcggctttcgccactgcgatcgtgctagaacgagcaaacaaaaacgaagtgcgggtgtgcatactcagagtatatctgtagcttgttaccccttgattcttttgtatgtaatatgggctctgcctgactttcactgtgtgat

SEQ ID NO: 6397 - DNA, 633 bp, Zea mays
catcaactcatctccaaacaaacttattgggtctgatgtcagcccttccccattcttttctgccatggggggcggcatcatgtgcgcaaaagcgtcaatgctactgcaggtttgtacatgcactcaattttgttccaagctactttaccttgtagtccatttagctgcttgtgttgttacagtactaaatgaacaatcttcatggtagttttccttgcataaaatcgtttttatggtatagttaaccttgccccaatgtacttcttctgatattgtagaatgtgccacctgctctacttgtgcgatttttgagggagcatcgctctgaatgggctgaccctggtgttgatgcttattccgctgcctctctgagggccaacccatataatgttccgggtttaagggctggtgggtttatgggcaaccaggttatactaccccttgcacgcaccgtggagcatgaagaggtaatctatcgatcacagttcctttcatctgtcatcttgttaatgtccaatataagctccatctaacttgctattttcaaattccagtgcttggaggttattcgacttcaaggacatggctttagccatgacgaggttcttatgtccccggatatgtttcttctgc

SEQ ID NO: 6398 - DNA, 380 bp, Zea mays
aattttgatcgagtgacatgtatggaaacttagggggtgtttgggaacaaagtttttctgcagttttggaagaatactgcagtattctcaaatactgcagtattatatacataatggtgtttggcaagctgggtaaaatctctgttttcaaaactgaagtattgcaaatactatagttgttttaagacattctaaacttagctctggaccttagttttcaaaactgcggtattataaactacggtattgttataattaaagtatagtatagtatttcaaaaactgtagttttcaaaaactttgttcccaaacagggccttatgtgcacaagagacgctgattaaacatgtaacgtaccattagccttggtacaggatagg

SEQ ID NO: 6399 - DNA, 424 bp, Zea mays
aagggaagcacagccatgatgttccagcagtcaggaacggtagccatgctgctgccaacgccaatgggtcatcttccaccagcctaccagtaccacacagggtccacagttcagcatccagtagtcgcagagcggcagaattacaaagcgcatcctcagcttcttctatgctactaaaagaggaaaacgaaataacataggagttttggagtgtgtagccagggtaaattatatctgttctctgatccatttcctcctaggtgtgctgcttcacgctctgcgccgcagcaaaaattgggcactgcaagcccccgccattggttttagtcaagagcgagctctttcgtttgtgcccttccaaaagctgcacaccctgtttggctgcgcggtgtatgttatgttgtcattaccatttacgcccatt

SEQ ID NO: 6400 - DNA, 385 bp, Zea mays
gctcgcgcttcatgtcatcgacgagacgctgaacccgctcggcgtgctttactgccacatggtagagccaaggatgcgggtgaacccagacgacggtattatgactctcgagcacatgctgctaccgttcaggagggcgtttcgcgggacgttcattgctaatggaggctacgaccgtgaggaaggcaatgccgccattgcccgtggccgtggctatgcagatctcatcgcatacggccggatattccttgccaacccggaccttccgatgcgttttgccaagaatgccccgctgaacaagtatgataggagcaccttctatacctctgatccggtggttgggtacacagattatccatttctcgatcaactctaggatgattgg

SEQ ID NO: 6401 - DNA, 521 bp, Zea mays
agagcgtctgtgcttgcgaagaacattgactgggccttggtgatgactatctgaaacagcagacgagtcgcgctgcatacctgcagtggtgcttgggatctgtacacaatttgtctcctatagactagcgatggacgtagtggggatgattgtactgttaccgcttagggcttgttcggttagctctcaatccatgtggattgagcgggattggatgggtttgaatcccaaacaagtcaaacttcttcacaattttttccaatcccatccaatccatgtgtattgggaataaccgaacaagcccttatagtggagtcgggaaactgacacatgtagattatgttagtagagaaccaaatggagtgaagccggccgcgcaagactcggcggcttcggccatcctccagagcttgtgtagagttgcctagctttgcatcttgccggaagcagcacatcgtgtagagattggacggttttaaaggatcggtggctgggtgtaagtaggttggtgggattacaag

SEQ ID NO: 6402 - DNA, 541 bp, Zea mays
acattgcaaaccgcagagaaggcatgtagggttttttttaataacattgcaaactgtaaattaaactcttaacgttaacatgatatgcgcaagaaagacagtctcacagccatcatgtgtggttttctaaaacttaacgtgctgcctgttctgttcttgtggcttcagcagcgcaacctccagtctccaccggaggcgccaccggacctgaaccgctgtgtccctccttggccgcgtagcctgccggcaccgagcaatgacatggacgtggagacggagctgtacataggattacccggcagggagcgctcctccaaccgggactctgattgaaccacggattttcagttcgatcggctaaaaggaataagctccctgaaattaaagcatcgaagggcacacgtcaatggttttatttgcaacttttgtatgcaaacttgtacttgaaaagtaaaaaaaataaaaataaatctgtagtatgtggatgcaagaaacggctggttagctagctgcaagccttctggggcctgaaaatgaaatc

SEQ ID NO: 6403 - DNA, 511 bp, Zea mays
gagagagatttctacttttccaagctgcgggacattgagatcttgtgccaaaaccctgaggttgagcacgtgccggtgagttactgccttgcggctatcatctgaaatttttttccctgttgtatccattcttcagaactgtatcgtgagtcgtgacgatgattatgatggtggtcgtcttcttgtctcaggtccatgctatccagaacatactctacacatcagaggaggaccctcagcagcaggctccagccctgagccccatcatggaggcgtccgaggagaggccgaagcaagaggcggcgcacaagagaaagagcatctcggacctggacgagtttggtatgtcgtccagctcaaggcagaggctctccgacatctcagacgtgcagctgtgtggatccccgctgacgagtttcagctaaagaaactgtcatctctacaaaatgggtgtctcgtctttctgttggattggttcgtggtttcgtatttcatgtgttgttttggtggt

SEQ ID NO: 6404 - DNA, 389 bp, Zea mays
gcatgccatcaccttcatcctcatcctcctcactgacataccaaacctgccttcttgacaccattccagtcattgggatgggcagtggtgacactcacaatggtagctgtgtcaccagcaccctcgagaacacacagagtgtcatggatggatatcccatggatcagatatggaaggagattgaggcaccacatgcacctaacttgctgagtattgctgaagggaaagagaagacgtgcagcagtagcccctgtcatctaccatcacctgtaatgtgggactacaaatgccctgagatattctggaagatgggagatcaagaaatcatgatgtgatggaaaatgaaatcaagatgttggctgcacgatttggttatgggcttatggtaa

SEQ ID NO: 6405 - DNA, 386 bp, Zea mays
cgaatcagttttcgagccattaggggccgaggctgagttgagtgtgtgaaacttcctatggcctgccacactcagttttcttatttgtgctgcaataataatgtatacaaaacagaaatgcgatgcccacagaaacaataaatgctgtgtcttcatgaactaactggagtggttccattttctcgaaaggggcgcgtgggaatctaaggtctgttgcttgctttcctgcctctgcctgcaatattccagccatggtaccaggtggatggccaaatactctagaagcgtttgccctgggcacttgcatgtagcttgatgtgagtagtgtaagaacaaccgggtacggaaaccgttgtctggccagcagatttcaaggcgtgtttaga

SEQ ID NO: 6406 - DNA, 384 bp, Zea mays
aaagaaggaatctcttacagcagagtcagagacggctgatggtgataagagtataaacaaacagattgtgctgccgcacggaggtggtttgtgggtgcccggaagcagcccgttaccagaatcagctctaaaatcatttgttgatttcaggagaacgatgtcttcctcgacttaaggtgggcaaacatcccaatggcgctatcaatttctgccgacaacctgcattggtgtggtccagcagcgtatctcgattgatatatatatataccctgtaaatctttaaagattatataaagatttaggcttttagctagtgttggcgtacaatgtattatactagtgatatccaactctgttgcctgtagatgatcgagctgctttctg

SEQ ID NO: 6407 - DNA, 358 bp, Zea mays
tgcctattcatcactccttttgctatttgtgcacttgtgcattttgtttggtatatggttttcacctgctgaatacccctatatcatcagtaaagggacaaaacggacataccaagaagttgcaaagctagacttccctgcaaaatagtgtaatctttgaaggtagcagtgaggatacaagtgtcaaaggcttctggaaattgtgaggtactttggtatgccaatactcttgggactagttggcccaaatttctcgagtagcatctagacatataccaaatatgtatgtccatgtgtaacttcttaacatagatgatagcgactctaactataagagtaactatggctgcggacttca

SEQ ID NO: 6408 - DNA, 506 bp, Zea mays
aggatgagaaatcgaatggaaatttgtaacaggctgaaacttctcctgactttctgactgctgatgtaaggaccaattttacttgtgaggtaccattaggtttacagaataccaactctgactgctgctgtaacgttcttgatttttttccccagataatttggtggtaacctgatactgataggacgactgagcaggtgttgatgtagggtattagatttttgtccgaggggtaaagttatatcatagggtttgacatggtcgacggctacagattcttcttccaggtgcctcagccctcagctcagctcagctgctgtgcttgtgctgtgttgtttttctttcctagttgtgctaggtcctacagaagtagtaacaactacgtagaaacccccagggccttgtttgaaccgtgggggggttagcgaatggtacagctgttgtagagctgctgattgagcttcttgacagaaactgcagcgtgttgaaggcacccatatttgatt

SEQ ID NO: 6409 - DNA, 357 bp, Zea mays
gttggtagctcctgtggtttatgaaggctatcgggtactacagttgatgaggggtctccagttagctgacgaaatcagtgcgcctgactggatggtgcaaagtcttcgtggcctggtatcctggtgggtactcgtccttggaatccaattgatgcgcgttgcctggttcactggactcagttttgctagaaattcaagctatggagcaagtggtgatatgaaccaataaatcatacaagaaaaacttgaggccgaacatctttgagaacctacaatgcttgagcaatcgttttgtaacgctttttgtagctgtggtaaatagtgcagtttctcttttgctggagcaggaaccaggct

SEQ ID NO: 6410 - DNA, 630 bp, Zea mays
ttgatgtatccatacggcgcaccttcagtaaaatgtgccgtatgcaattatgtcacagctactggagtatgtcaagcctcattctttgcctacttgccatgcaaatgcaatcggtgtattatgcagagtttactgaccattgttctgaatctcaggtaaatactgtggcacccaccccatctgcgaggccaacatcagatgtgtcttcatatagtggctcatctacttctgctgtaagcccttattaacgaaatttaatagtttaactggtcattcccgaaatgtagagtgatttatcacctttttgttttcatcctgcagcctaaatctcaatctcagaatgtaactgttgttgttgagaaccctatgacagttgatgacaagggaaaacttgtaagtcttcgttacctactgacttgcatattttgcattgctgattgaaccgtcgtttgattaaattcgttctgtttgtttcacacaggtcagcagcgttgtagttggagtcacagctgggaaagagtgattttattgacacttcgtacatcattgttgtgttttctatacacgaagttggaaaataccatgtagcatccaatgatgggttgcttggacttccttgaagaacagaga

SEQ ID NO: 6411 - DNA, 442 bp, Zea mays
gtcagccctcaagttgcggactgcaggatcgatgaagggggaggagggatgtcacgggaacttgatgttctagaaggtttgcgtcactccattgatgctggggcaacctttgtgagttctgattctcttgctgaacgatcgtgtttgcctggttgacagtttcggggcctctgccagcttctttgggctttgctttaaagataaattaaattattcatggatttaggagaatgaggaaccgacagtgagtagaactatcttcgcatcgctgtggtttatgtttcttatgctggtgttcagtgtgtatatatagggtacagaatactttcatatgagcactgaagaaatcgaaattgacaatgtttcatgcgaaattgtactgcgggtatgtaaatgaagtgcgcctgacttctgacttgtagcctgtttgtgcttagctgaa

SEQ ID NO: 6412 - DNA, 301 bp, Zea mays
acttgcggtttgagattgtcgacctgcgctcggctcaatgatcaatgggactaaagctatggcagcacgtgctcccttgtgctccctcttggcagaagtatataccatagagcttgctgacgatgcgtgataggtatagtgacagcgccaagccggaaccaagatgctcatgttacttatctgacatctgcgctggtatttgtcaaagaaaaggagtaactgaaaactagcactggttatcttggatctgtctgttcggccagcctttgagttggtattttaagtaatactgtatataaca

SEQ ID NO: 6413 - DNA, 479 bp, Zea mays
gaggatgagaaatcaaatggaaattggtacaaggattaaaggctgaaacttctctctctttctgactgctgatgtaaggttacttgtgagctgccgttaggccccttacagaataccaactctgattgctggtgtaatgttctccatattttttttcagataatttggtggtaacctgataggacgacaactaaagaggtatgcatatacggtattagacttttgtccgagggggtaaaattgtatcataggatttgacatggttgacggctacagattcttcttccagttgtgctgctgtgctgtgttgtctttcttccctcttcgtgctagatcctacagaagtacaactatgtagaaacccccaggtggtgtttgaagcctgggggggcttagcggtgtggtattggtatagctgttgtagagctgctcactgagcttcttgacagaaactgaagcgtgctaaagcagtcgtgtga

SEQ ID NO: 6414 - DNA, 384 bp, Zea mays
agggtaaaatccttgttggttctcacttgcccacccagcagtccattatcggcgccttccataccagcgtcgtgggtggtcacagcggtatcccagtcaccacgcgccgcatcaaacaactcttctgttggcggggactcaacaagtccgttactgacttcgtcagttcatgttccatctgtcttcaggtgaaaccagaccgtgcacggtacccagggctcttgcaaccattggcagttccaacagcagcctggcagacaatatcaatggattttatttccggtttacccaagtcaggcaatgctgacggtatcctggtaattgtggacaagttcaccaagtacagtcactttctgccgattcaccacccatacacagctactt

SEQ ID NO: 6415 - DNA, 385 bp, Zea mays
ggttccgccaggcgcgacgatcccaatgccctctctaggatcacttgcccctacaaaaatgattggaaatccatcagctatgcaggggtacccagggcttatgatgccaggagagccaaaggtagagcctttctcgcgaccacacttcccaacgtcaattgcacctccgccagcttaccaacagatactgagcaggcctccttttggtcatcagatgtaaataataggaaggggatagatttgcttcggcttgtatacatgatagctacgctgcaacatggctttgttctagttttgttgatggatcgtccgatttttacttctttttaaattttcagctcacggctcacgcatttctttgaagcaaagatggctgaggatgata

SEQ ID NO: 6416 - DNA, 507 bp, Zea mays
ttccttctttcacttgttggtcatggccattaggttcgccctctggaggctggagctactgtgagtatagcatttttcaaactgatctcatattcactcttgtgttttcctcttgtcaggctatgtttcgaccatgggacatgatatttctatcgatccaccctaaatgcagcgacctacctggaaaacttatgatgttgccatttatctgtcgtgactcctggatctaactgccacatatcacatatgcggttcctagtatgcttgtttaaagtattcgtgtatatatatttccatctgggtttcttgttggaagattctggatggggcaccagatcagctgttgctggtcagtggtcacagtgggcttgacttgtgtctctatgacgccaatattattatgtcatgttcttgtggtatttccttcatttgttattctgtttttcgctgcttatcccatatccctgttttctccgtccttcacggagaccaacgtcttaggacata

SEQ ID NO: 6417 - DNA, 433 bp, Zea mays
  misc_feature (420)..(420): n is a, c, g, or t
gagcagccaagctcgaccgcttccccatcaccattagtgatccaatctcagctacgttcggtgaaccatttgagaaagccaacccaagccattcctccacagcaatcgtttgtcgagctggttcaggaattgatatggttgttggccttgtttcttctagtctaggtgctgttgctagtggccaaggcaatttcaaagtcttagtttgggatcctggtggttatgcatatcacagcttggggacaagctgtatttcaagcggtggggaatgtcagcatctcagacaggagcaatgagcagacaacgagaacaagccacggcacgtgagagtccatcgtccaaacgccaaggttactgagccaatatgggccaagtagtgggtcagctatctatgggtcgcttgatgttcgagtagtacantgttcgagtagta

SEQ ID NO: 6418 - DNA, 605 bp, Zea mays
ggagaggaagaagtcgtacataaaggacttggagacaaagagcaagcacttagaggcagagtgccgtcgcctcagctacgcacttcagtgctacgcagctgagaacatggcactgcgccagagcttgctgaaggataggcctcttggtgctcccacagccacgcaggagtctgccgtactcacgggtaagacatgttatccgtcctctaatctttattcattccctgaaattagatgaatcgatttgtctaccatcagtgagtcctctctggcttgaaccgtggatatggtaggtcagtcataaattaccaagcaagtaaccaatcaaaagcacaagtgcaaccatttttttttggttagaatcttgcagtttgaaaggctggtgaagtaattcgtgatgctaagatgaattttctttttatgtgcagaaaccctgccgctggtttccctgctttggctggtgagcatcgtctgcctgttcctgatgcccgttctgcccaaccgaagtccagctgctccaagcagcggcggaagagacctcgtgatggcagccggaaagacaagcagtgagaccccagagatactggaactcatcctccatggaa

SEQ ID NO: 6419 - DNA, 348 bp, Zea mays
cctttgggaaaagaagatgaaacctgttacagagatagtggctgctcaagttctcgaggaagcaacagaggaagaaattaacatagttgcctcccttgccgagaagtgcttgagactccgtcacgaagaaagacctacaatgaagctagtggaaatgactctacagtttttgcgagcagagcggttgaactcaagtagtgatgttcctgcaagcaagcaagaggtggaagagcttttgggtacaagcgcttcctattccgactcattgggttctgacaatttgctggacaataaagctgctacaacatcccaacaatcaaagggatattatagtttggagcaggagtt

SEQ ID NO: 6420 - DNA, 306 bp, Zea mays
gctggaatgggaagcagttgaagaggaaggtcaggggcaccaaagtcgcgccagctgttctggcttgcccatctgcgctggtctaatggtggagctggctcattagggtcgtcttcctatttttatccatgttacagtctgctggagtgttgacaatggttgtgtgtcagggtctgttcccttttggtagttttaaaactaggccttcctacaagtgtgtggaacgtagtaaggtgtcagcttggggggagcaaaatcagttttctccctcccttcctgtcttgtttctgtccctggctttgtact

SEQ ID NO: 6421 - DNA, 493 bp, Zea mays
gctgaggaaggtcgctcgccttcagatgaaggatgtggccgtccgtcttgccgaaaggggcatcgctctggctgtgaccgacgccgcattggacatcatcttgtctctctcttacgatccggtatgtgaccatccatgatttgatccatctgaattcgtcggtgacacacctgatggtgctgagtgctgactctctctctctcttgtgtggcttcaacaacaggtgtacggcgcgcggccaataaggaggtggatcgagaagagggtggtgacgcagctgtcgaagatgctgatccaggaggagatcgacgagaactgcacggtctacatcgacgccgcgcccggtaaggacgaactggtctacagggtggaccggagcggcggtctggtgaacgctgagacggggatgaagtcggacatcctgatccaggtccccaacagctccaccaggagcgacgctgcgcaggccgtcaagaagatgaggatcatggag

SEQ ID NO: 6422 - DNA, 390 bp, Zea mays
ttcgccttcgaggaagaggttgtgaagctaatggaaaccagcatcacaagcgcaatgcagtaccttcagaacaagggactctgcctgatgccagttgcccttgcttccgccatatccacccagaagggcgtctccgccgcgtcaatccctcccgaacagtgaaataaagacatgctgctgctcccatgagtacgaggaaacaactgcagaagacagaaaactcaagatggctgaagaatgcagcaaagcccgtatagagtacagggtaggaagttagtctgaccagtgttcatgacctcatctactaatttgcttttcagaatcagctttttggtatctattgcgcataagttggtttttccttttcccttgctctgtctctctctctca

SEQ ID NO: 6423 - DNA, 363 bp, Zea mays
gacactactgggcagtcaccatgcttggctggactgcgcttgtgtttgtcttgagcttgaagcgcacagggtctatggagctgagttttattgagatggagccagtgacggacccctcgctgccttctgttggtgtggtagccaccagaaatggtagaagtagaactctgcaaatggatgccttgtccggaagaagagttgcagacattgtataacacgcagagaggaaatgtttgaggaatcctgagtttttgttctgaaaactgtatcatgtcgacacaatgatacgtattgggtttggaattctggtgtcgctgatgtctttggtcattgctggtgtaaaggaattcttcgtcttggcct

SEQ ID NO: 6424 - DNA, 373 bp, Zea mays
ttcaggacgcggtggagtttcacagggcaagcaaagcaccggacgagccgctaaaggcgcccgagaactcttcgaaggcagcagaagcagaagcctgaagctgcactcgggtcacgcttactcgttttttgtacgtgtcgaggaaggagctgagagatactttctgtcattgccttcttaagaatgttacgtcatgacaatgacatgatgtcctgagcactggtgctgttgttggaacagtgggtagccttgacgaactttcattagctacagtcctaatctagagttctggagacgagactcgttagatttattcgcttgtcttgtgctccgttatgtttgttctatcggttaagctatgcgtcatgtgtta

SEQ ID NO: 6425 - DNA, 371 bp, Zea mays
catgtgctgagccttgaatcaggtccgaccatggtgaaggcccggaccatgtggaggcctaagggaaccaaggcccaagaaacagttgttccatcttcaatttgaattgtgtgagacgttcgggatggtgattttggcaacaaactactactatttggcaaaaagatcagaatggttactagcgtcctctattggaagcaagtcacacagggcgagacctaaactaatttaattatgaagtgtgaacaatagaggagatataaatagtgtgaacaatgaactggaggagacagaagcggggggagatcgaagacaagggaggcctcatgtgcatgacaatcttcggtcgcacaaatgggtgttgtaagtat

SEQ ID NO: 6426 - DNA, 414 bp, Zea mays
agaacatagcgatttgcagatgcatcagactgctgctatcagtcgacgcctctagcacagtctagtgctcagttgctcactcgatcacaacctggtacggaaagaacacacggggtagctgctccatgcccaatcctaaatcaggcacaggcaataccgatacgccaatactagtactgatttaagaatagcaagcatactactagtgcagtatgtgtctggtggttttccgttccctctattttcttcgaaaaggcccgtatgcatgcttcacaactcggcccacaagagcggctcgtgcatcccgacgacggcgtcgcagccgtcgtaatgctcagcggccattgccgccggccaccacagcccgtcccgcaggtcgaggagaaggtcgggcaggtcgaacagcgtgctctc

SEQ ID NO: 6427 - DNA, 429 bp, Zea mays
attccacctcacaccctcaggttggctgcaacacctccgacaatgacttttcctactagggcctagattaccggcccctctccgcttaccagagcctcctccacggccgcatcatcaacgcctcactccccgaggtcgtcgctctctgctcctcccatggctatgaatctaaggaattgtatacgccctctccagtagattcttcctgctcgttgtgtggcaaattgtgtgttgttaagacttgttgttgatttgtccgctaggaagttgctgaagcggtggacggttgttggtgttcttcctagctgctctgaggtctgtgtgggcgtacatgaaatttggagtgagtattagtggagaggagctacgggaggggtggatgtggctgctagccatggtcctcatcagtccttgcttggtattgatcga

SEQ ID NO: 6428 - DNA, 842 bp, Zea mays
gcctttcatgtaaggtgtgccctcctcgctgtcccgccgcctcttttgttcccacaatctacagacaagttcatgactactccaggattaaaggcgagtagtgtggccaggtctctcggcatataatttcagttcgacagacctcaggaggatggtgcctgccctggcgtagtagcaccgatgagtgatgaaggaggcgtttgcaccttttgtgcttctcgctagctccatgccttcggctgacgattgtgtaaggctatccgcactcattttaccttatttctctactctaaaaggaatattctgtcctggtcagcgagattctttaccctatactaaaatcatctgcagccatatttaccctatatctctactctataccaaccactacaatttttatttccaatttaatattcccccctctctcgtcccatggcgggagatggagccgttggccacgtgcacgaaagagaagaaaatagggtaggagagagaggacgctggatatgaggtaagagaagagcaaatttacggtagggatgactttcgagttcgcgagtgcagggcttcagtctactctaaatatttacggtaccttttcgcgtttgcgagtgcggccagcctaagggtgcagccgtgtgcagtaggcttctgaaaggtgatattggtctgcggcctgatgtgtgtacatataatttttgccaggaagcgtgcacccttcctggcctttcctatccccaaaagctcggccatctaggctcgtgaaatgctgcttcagatcaaggctgtccttggaaatgggaagatgaaaggagaatctgggtaatgccggttgctccctt

SEQ ID NO: 6429 - DNA, 518 bp, Zea mays
tatcccgcaacaaaatagggcctaacggtgtcgaggtcagtaatgaacctttcgttagctctctcacctttatggtttgaaaaatatgcagtttctccacctttttctttctccttgacttgacctgatatttgacatttcacttttctcagatacctgggctcattaaaaaatggcagcagtagacataatgtacaagttaccgttctggaaaatgttcaggaaaatgatgagtaggtctgcctatccgagttctcttcatatcgaattaaaaaaaggttcaagatgatcatgcgatcgttaacaatcagtcattggtttcgtcatctgttggcaactctcccatgtcgcttgagttgctttgtttctgacatcactctgcgacctgccggcgtcttttgtacgagggttcttgtatgtttttaggtagagctgagtgcagtgcgttgtaatgctttccgtgaggttactatactgctatcaagattcaagcaggatcagctcgttatgacagctct

SEQ ID NO: 6430 - DNA, 378 bp, Zea mays
tccctttgagccccgagatggaggtctcactcgttgagcgtgatctacggtttatctccttcagcactggtcgtcgcggctgcatcgctgcagctcttggcactgatatgaccatcatgctcttcggtaggctcctgcaggggttctcttggagcaagatgaccggggtggcggccatcgaccttagcgagtccaggcacaacactttcatggcacagccactcgtgctacaggctaagccacggcttccagcgcacctctaccccgggatcttgctttgtaagtagtcccaaattgcggctgagcatgtagaaaatttcaccacttatacaggcttaaaatcgaggaatgagagaaagcgcgagaggaatagaaaac

SEQ ID NO: 6431 - DNA, 382 bp, Zea mays
ttttgcacggtgtcacgatacggggttcaaatacaagacgacactaaacagatgcaaactgtattcgcttctaatttgaagcctctcatcgattatatggccctgattgctgttacctcctgcctggcctgccctgccccctgagtctggtcaatgaccatccttgtttgtgatgcccctcccgctgttgccgtcgtagcttttgtagagtacatgtaaagatccttgtaatggcgaaatcatatgttttgctcaagaaatatatagtgtcatttgttctttttttttggctcgctaattttggacctttatccgtggacagtcttttgttgacgttggcgctgaagttgataccgtcgcaggaacctgtaaggatgtaact

SEQ ID NO: 6432 - DNA, 398 bp, Zea mays
cgctactctgacgaggaacactctgatgaggaacacaggaggtcacacaagcatcggagggagcatcactccagttctaaaaggaagcacgaggaagactgataccaggttcgccggaagtgtctgtctagatcaggtgccaagtttgaatcagacaagctgtctgatgacactgcacaaatcaactcagggaacaactgaagcgccgagtaaactgagagcaaaaatcagagcaacatactgtaatattttgtatcacagcagtaacattatgtccttaggcctctgttttgtagccaattgctctttcgatttctgtatttgtttcgaacgttctaactaggtgtctgtccatcttatttgaaatcagtgacctgctcgccaagttctaactacat

SEQ ID NO: 6433 - DNA, 357 bp, Zea mays
tcgacaacaatgccttcggcatgcagaacggcttcggtaacatggtgcacgggcagaccatgaccatgaggaacggcattggcagcgtggcgaggacggtgaaggaggacaactattggtttaccgacctgaatctggatgatctacaggcaccctacaacgtgacccatgtgttgaatccgaaccctgttcagacgatgaatctggcagctgggcaaggccatggctacttgcagtctatgagctcgccgtcgacgaagatgtggcagaccatcttgcctccgttctgagagttgctgtgatggaagggggaagagatgatcttgggcgtaggagtggttagactggctaggaaca

SEQ ID NO: 6434 - DNA, 400 bp, Zea mays
ggctggcgaagagcggctcgctccggctgcgctccagcgacgcctacacgatggacgtcggcgaagatagtccgcagtggaggcagctggcgacgaccggattcccaaacgtcggcccaccgccgaggctcgatcacgttgcggtgagcctgccctgtggacggatcatcatattcggtggctccatcgcgggactccactccccggcgcagctgttcctggtcgatccagcagaggagaagccgacgtggaggatcctgaacgttcccggcaaaccccccaagttcgcctgggggcacagcacctgcgtggttggcggcactagggtcctcgtcctcggaggccacaccggggaggagtggatactgaacgagctacatgagcagtttagtcgtaccgt

SEQ ID NO: 6435 - DNA, 350 bp, Zea mays
atgtaaggcagtacttgtggttgtttgaggagcataatgtgatggagtttctaattcttgctggtgatcgtctataccggatggactacgaaaagttcatttaggcacatagagaaatatatgctgatatttgtgttgtggccctaccaatggatgagaaacgtacaactgcatttggactcatgcaaatcgatgaagaatggaggatcattgagtttgctaagaaaccgaaaggagagcagttgaacgaaatgatagttgacaccaccatacttggccttgatgacgtgagggcaaaggcaatgctttatattgctagcatggatatctatgtttttagcaaagatgta

SEQ ID NO: 6436 - DNA, 368 bp, Zea mays
gagccttgtgctcaacaaaattttgtggaagagaataatctcactgatgttaagacagtcaatgaagataagagtgatgatgtaattgctgatgctgcagctgctgcaagatcagcacaaccaactggcaacaccttcttgactacaaaagtgcgcacaaaattcccattccttcttaagcattctcttcgtgaataccagcatatagggctggattggttagttgctatgtatgagaagaggcttaatggaattctagcagatgaaatgggtttaggcaagacaatcatgactatctccttgcttgcgcaccttgcgtgtgagaaggggatatggggtcctcatcttattgtcgtgccgactagtga

SEQ ID NO: 6437 - DNA, 549 bp, Zea mays
acacaacattgcaaaccgcagagaaggcatgtagggttttttttaataacattgcaaactgtaaattaaactcttaacgttaacatgatatgcgcaagaaagacagtctcacagccatcatgtgtggttttctaaaacttaacgtgctgcctgttctgttcttgtggcttcagcagcgcaacctccagtctccaccggaggcgccaccggacctgaaccgctgtgtccctccttggccgcgtagcctgccggcaccgagcaatgacatggacgtggagacggagctgtacataggattacccggcagggagcgctcctccaaccgggactctgattgaaccacggattttcagttcgatcggctaaaaggaataagctccctgaaattaaagcatcgaagggcacacgtcaatggttttatttgcaacttttgtatgcaaacttgtacttgaaaagtaaaaaaaataaaaataaatctgtagtatgtggatgcaagaaacggctggttagctagctgcaagccttctggggcctgaaaatgaaatccac

SEQ ID NO: 6438 - DNA, 525 bp, Zea mays
taagtcaagtgctgataggttgccaggctaaaggtatcagagttgcttgcaacctgccagagagatccatgaagcaaaaggtttacggggatggtatccgactccagcagatcgtctctgacttcctatttgtttcggtgaagttctctcctgctggtggctctgttgacatctcttccaagctgactaagaacagcattggggaaaaccttcacctcatagacttcgaacttaggtatgctgggcatgctagtttgcaagcatacattcatttctgaactggaaagcatgaggtgtgaaggcttaagttactcttgtgtttatggctttatgattttcaggatcaagcaccgaggagcaggagtcccagcggaaatattgtcgcaaatgtatgaggaggacaataaagagcagtcagaggagggcttcagccttgctgtttctagaaaccttctgaggctcatgaatggtgacattcgtcacctcagggaagctggcatgtcaaccttcattctcactgctgaa

SEQ ID NO: 6439 - DNA, 914 bp, Zea mays
tatgtgatgtcacttcgcttgcttctcatttttgtcttggagatggtaggagtctttaagcttgaactattttttagggactcgcgagatcaatgccaaccagtggtgctcttgatcgtgttgccgagaaattgaatgttccattctttgaggtaccattgccatagagcttcactgttcattgtcatatatacaaactgacaaagtgttgtaaacctgtaatttctacttgatcatctaagactaagatgccacttcttaggttccaacaggctggaaattttttggcaacctaatggatgcaggaaaattgtctatttgtggagaggaaagttttgggactggatctgatcacatcagagagaaggatggcatctggtaagaagtaaattacttatcagctgtagattttgttaatcaattttttctttgtaagttctaaacagagaagctttggacatcattcatgtttctgtttgtgtgaaatgtctgtagacaacttccatactcttatcaactcttgactctcagggctgttctggcttggctttccatacttgcacaccggaacaaggataagaaggtcggagagagattagtgtcagttgaagatattgctatggagcactggaaaacctatggcaggaatttcttttctagatacgattatgaggtatttaatcaaatggtttcctgatattacacttaaggccatatatcttggaaccacctgatcaaatttcttgcacagtcatagtaatctgaatttgccaagaataatttgagtgcatatttcttcttaattaaaaagccacctaattcctcctaagttggctgagtttttttggtttaaccaatgattttgtaattctacaggcgtgtgaatcacacagtgcaaaccagatgatggatca

SEQ ID NO: 6440 - DNA, 413 bp, Zea mays
cacgggcctagaccagaagcagatcaacaactggttcatcaaccagaggaaacggcactggaagccgtcggaggacatgcctttcgtgatgatggaaggcttccacccgcagaacgccgctgctctgtacatggacgggccgttcatggccgacggcatgtatcgcctcggttcatgaactacacacttccatggacgactgtgtggggcctatatatccaatcgtcggaccgtgggagtatatttcagtgtaccaggaccaggatgcgttgcagtgcaaggacattgttgtggaatttttgttgctgattgccaaggggtgggtcggtcgatgtagcgtctatgcatggcttgtagttctcctgtaatgttgttgttaatttccgcttggcggcttgtaatcttaggtgtat

SEQ ID NO: 6441 - DNA, 391 bp, Zea mays
gttggcccttgacgagaagagcttcagggtcattgcattcagtgagaatgcacctgaaatgcttacaacggtcagccatgctgtaccgaacgttgatgatcccccgaagctaggaattggtaccaatgtgcgctcccttttcactgaccctggtgctacagcactgcagaaggcacttggatttgctgatgtttctttgctgaatcctatcctggttcagtgcaagacctcaggcaagccattctatgccattgttcatagggcaactggttgtctggtggtagattttgagcctgtgaagcctacagaatttcctgccactgctgctggggctttgcagtcctacaagcttgctgccaaggcaatctccaagatccagtcactaccaggt

SEQ ID NO: 6442 - DNA, 339 bp, Zea mays
tttggccagcgcgctggcctgattcggcttttttgccgacgagccggaaatagcattggggcccaagtgtttcgttgcctacccagtaccaacaagtccacaaccacaatgctcgggttactaaaaggtcgataaaatacccaaaaaaaaaacagtcaaagacagtgttcgtcgaaaaaaaactaaggaaaaacaattagtagtaaaactgaaaatacctttaatactacatggcaccttgaacggcatgttgttgtcctttatagatcacgattactgtggtattggggctattcaattattcttccacgaaggtgtgtaagcgtagtgtgtctcttc

SEQ ID NO: 6443 - DNA, 402 bp, Zea mays
gctctggagtttctaaatgagctgggttggcttcttcacagagcgaacagaatgtctaaagagaatgtaactgatacatctgtagctacctttagcatgtggagattcaggaatcttggtgtatttgccatggagcgggagtggtgtgctgtgatcaaaatgctgttagatttcttatttattggccttgtcgatgtgggatcccgatctccagaagaggtggtgctttcagaaaatttgttgcatgctgctgtacggaggaagtctgttaacatggttagatttctgctgagatacagaccaaacaaaaactccaaggggactgcacagacatacttatttagacctgatgctctgggcccgtcaatgattacccccctccatatagcagctgccactagt

SEQ ID NO: 6444 - DNA, 1240 bp, Zea mays
  misc_feature (755)..(755): n is a, c, g, or t
  misc_feature (1207)..(1208): n is a, c, g, or t
  misc_feature (1213)..(1213): n is a, c, g, or t
  misc_feature (1226)..(1237): n is a, c, g, or t
tactacaccactgacagccttgcgctctgcgcgttggagaaagctaacaagtaaatattcatcgtatgcgcagaaccaacttatgctcgagtcaatttcggagctccaacggaaggtaaattcgtcgagcttgcttaaagttggccgttggaacttcctttttaagaaatgtaaggtttctttagctgggcattaggtgggcatggtttgttgcaagtattgactgctctggttgcctagttacatccacaaaatattcctgctcttgtgctgtgctgagtattggcatgcgatgcattgccgcaggagaagtcgctgcaggaggagaacaaggttctgcagaaggaggtagccagacgccgccgctcctcaacactcagctagccctctgttttctcatgacgcaaattaaatttacagaaagcgttgctcctgcctgcagctcgcggagaagcagaaagcccagcggaagcaagtgcaatggggccaaacccaacagcagaccagttcgtcttcctcgtgcttcgtgataagggaagctgccccaacaacaaatatcaggtagagcacattcacatcgcgctacaagcctacaatcccaaattgtgaggtggcctcggtttcgggtaaagatttgagtgagcttgggctttatctaaaccccaattcaaaaatacacataaacttgtgcttttccaaaatttgtagaaaatatagatttttgtagaccatgcatggaacaattatgttgacanacaatgttcgttgaatttttttttgaccatttatgagccccaaagaaaaagaaaaaaaatttttcacgttatgatagaatcctgtttttcctttcccagaaggtacgagggcaacttttttttttctacaaaactccgtgtgtcagtataattaatcatccatctagctgtatgcgtttctccgataaattttatgcttgtggtttttcttttgtatgttttttttcaaaagagtagccgtacgcctatgctcaaccaagctacacccaatttcctagtacactgttgacatttcaggaagcaactgacaagatagtctccgtctgtgtccgtttctttgcagcatttttcctgtggcagcaggcgggaggttggtggaaggtgcagcagcgcagccacaggctcgcgttggactaccaccatggatgcttagccacctgagcagcgaagtnncagcntcaaagagctcannnnnnnnnnnnccc

SEQ ID NO: 6445 - DNA, 810 bp, Zea mays
gtgttgacaatgaaattgtgctttgggaaccgaagacaaaagaacagagtcctggggaggtaattcagtttcagtttaactttcccagaattgtattcctattataatgccatatatttacgcacagttgtaaactatttccagatccttagatttcaaggtactggctgccaataataaatatgttccactgaagtaatatgattttctgttgcctcatagggaagcatcgatattcttcagaagtatcctgtcccagaatgtgacatttggtttatcaaattttcatgtgattttcacttcaatcagttggcgataggtaatatctctcatcaggattgtttctggtagaagttttatttaagatttttttttgctctgtaaaatttcacacacgcacgcgcacccccacccacctgcacgcgcgcatacacacacaccgcacacacgtacgcatatatatgacttttttcccacaaatattttctatgtcagatatcagcaaataaatttgtatgtttgattatatttagagatataggaaaagttgagtgctctaatacccatccactacttcaaacaggcaaccgtgaaggcaaaatctacgtgtgggaagtacagtccagccctcctgtcctcattgctcggtacttttcactgcaagagtttcagttattcttgtctcccacttgtatcgtcgcatgcttctggatgccaatgcttcatcattttcaggctgtataatcagcagtgtaaatcgccgataagacaaactgcagtgtccttcgatggaaggtacctcgctctaat

SEQ ID NO: 6446 - DNA, 325 bp, Zea mays
acatgtaaggtccattgtaaaagctccatctgatgatatgaagaagatacaggggctacttgaactgagaacagttacaaatgagatggtccgcttaattgagacagcaactgcccctgtcttggctgtcgacattgccggtaacataaatggatggaacaataaagctgcagaactaacaggtttacctgtaatggaagccatagggaggcccctgatagatcttgttgttactgattctatagaagtggttaagcagattttggactcagctttacaaggtttgtcactttgctttcagtcgatttttttgtggtccccagct

SEQ ID NO: 6447 - DNA, 425 bp, Zea mays
gtttgcagtggcggtggagttggtacaattgatatcagaatcctccgtgagcaggagccaagaatccacttcctcttcttcctccctgataccatcatcggtagaaacaaaagctcttccctcatcaaaaccaggggctgctggaatagcagcagctggaagttgtttttgatgaaacagcagctggaagtggcagcacagacactcgctggtgtctatgtgtatttgcagagtgcacctttgcatcacaggtgctaaatagtgctggtgcatctgcacagcatgtcaatactgtgggtgcactcttgcatacctcacatacatgcacgcgctcatgacatgatgccacttgattagcagaatgaacctgtttattgcatgacgtgcaaagacactcagcatcagaatggcagtaaaccatgctt

SEQ ID NO: 6448 - DNA, 827 bp, Zea mays
  misc_feature (820)..(822): n is a, c, g, or t
tgaataagaaagtcgtccttaatcttactgctcctatgcaattggtgagatgtctctatatttttatatttgttgcaattaagacatagctatgacattaatctttttattgtttcatgtatgccttattttgtatctcaggttaatgagctgaaggagaggatgctaggctctggaatgccctggcctggtgatgaaggcgacaagcgttgggagcaagcatggatggctattaaaaaggtaccctgatctaaaattaatactagcatccataagattcggcacatccttgtgggtcatctgcttagaaacaccaatggctttaactttaagggcatgttttgtgcagtggtgagaactgtctcactaagtcaccaggttgtaagttcaaaggagtctttgtatctgcgggaagggcttgcctcggtttgtcccttccaatccatagacccctttcatgtgggagcctttggcactgggtctgccctattttcttttttgtcttcattcatgggccatttgatctcatatattgtagatagatctattaaaaataagcaacatgcatggaaactgaatgtaagaaaaaaaatccaagtatgataattgaatatctccatttcctttttaggtttgggcatcaaaatggaacgaaagagcatattttagcacacgcaaggtgaaacttgatcatgagtacctttcgatggctgttctcgtgcaagaagttgtgaatgcagattatgcttttgtcattcataccacaaaacccatcgtctggagattgttcatgagatatatgctgaagtgggaaagggcnnncgaga

SEQ ID NO: 6449 - DNA, 367 bp, Zea mays
tcaggcatttcttgaagtggttaaaagcagaagcctgccatgggagaatgcagaaatggacgcaatacattccttgcagctcatattgcgtgactccttcagggatgctgcagagggcaccaacaactcaaaagccattgtcaatggacaagttcagcttcgggagctagaattgcgggggataaatgagcttagttccgtagcaagagagatggttcggttgatagagacagcaacagtacccatatttgcagtagatactgatgggtgtataaatggttggaatgcaaagattgctgagttgacagggctttcagttgaggaggcaatgggcaaatctctggtaaatgatcttatcttcaaggaa

SEQ ID NO: 6450 - DNA, 683 bp, Zea mays
gctctcacacttttgtatttttaagtttattgcctgaaaatctgttctgttttttgtgttttctatcttgagttgctctaccaacatttcctagatgagtgcatccaattttttttagttcctgtattaactccttaccttattgctgatgtgcttctttttggttcttatatttatgttacctgtagattgctgaattaaaggaggctgagaaagagcatcagaaggagtcagaaaggatagagaaggaacttgctgaaatggaggaaatgagggtaggggatattcttcagtgttcatataattccatttccagaatcattagcatttatcgtcatttttaaagacaccataccctttcgctttaatatcttgtttatgtgtacagaaaaagatcagtacaatgacagcagatgattactttgagaagtaccctgaactcaggaagaagtttgacgatgaaatccgtaacgataactggggatattgaagagattggagagaactcttatgatgccatttccatgtccgtgaagaaccaataattttcctgtgccctgaattgggtggtttccatagcatgtgcacggggtttgggtggaatgcctacagaatcgactgtgtcaagctttcttgattccgtagaaacatgttttgtttgacctcatcatagaggatctccg

SEQ ID NO: 6451 - DNA, 391 bp, Zea mays
ccttacgcccctccagtctcggtcttgccggcacagattcaagctaacgcacccccatctcttcctctgctggcggtctctgtaaacccgccagtccaacatgtttcccctgtgaataaccttctgaacagagcttcagtgcatcagcatggacagcagcaatacgctttgttgtctgaccctgttgccacgcccttgcatcaacaagcagcggggagcaaaccagctgtagcagcacatccgtcgttgcctgagcctaatgcatcatctcacacagcattcccttggcaatctaatgctgctgacatgacccacgctggacggaatgcgacggctgatccatgggccgccgcccgcgcagctaactcgtatagtacagcatcagcaggca

SEQ ID NO: 6452 - DNA, 421 bp, Zea mays
acactttggtgagggagttggattcagtggcgggtctgtggaggtacactcttcggtataagcaggctcgattgcggaataccattgcgatggactcctgatcttgttttctgcctgtttattttttgctcattggataggtgctggcagctacccaaacagctggggaatccggaaagaaatggttccagggaacagcagatgctgtcaggcagttcctctggctttttgaggttcttcctgggccatgtgtaatactctacctttcagagtatgctatcactatgtccaattaactttttgcctgatgttattctgtgaaggatgcaagactcaaatgtatagaaaacatactgattctgtctggtgatcatctgtatcggatggattacatggattttgtgcaggtctcctatctgct

SEQ ID NO: 6453 - DNA, 624 bp, Zea mays
aagggtagaaggtataaatgtatgggagtcagaaaaagactaagtgttacgtgaatatacctgcatattttttgacgagtgtgccaacaaatagcacaatctgtggggaattctgcccatcttcgtatatgcgctctcctgggaatagggtggcttgggcaccccacaacacgacattgaccgaagcacctctgttgtttccagttcgagcatggaacatgagtcacaaacaatgtatatgtaagacaacgccaaaatacataccatacatctagcagaacacaaggtaagaacaaccatgtagtccaaaccttgcactgcatatggaaatgttcctcttcaagctggaagcttgttgtcctttggagcgatgtggcgaaacattcgagactgaagtaactatcccaatggcatctgctttcaaacgagcagtatatacaatattagcaaagaaaaacaggcgtcttaagtatataggtaacaacgtttacctgtatagtagtctttatggtcgatgcgcgaatggatctgctctatgtgagtgagggagtaggtaagtgtaggaaatgcaggaggaatctcaataacctgctctaactttgtccaattcgtgaaggtaatcat

SEQ ID NO: 6454 - DNA, 778 bp, Zea mays
cggggagaacagaagctgcagcaacagtgctcatcatcaacacctcgatcaggtctcaatatcatatccaccaccagccggcatagctcctgctggtaccacggcaagagaaagagagatgacgacgacggctaataacgggacggtcacggatatacaggatctcaggaagtctaggctcagctggaccatgcagctgcaccgccagttcattgcagctgtgaattccctgggggaaagtgagaatcacattcatttcccttttattatttaagcatgcatgttcgtatattttactactaacctatatagtttgtacgtacgtagtgtttctttagttaattattcgtattagttacacgctttggtttacagaggcagttccaaagaagatattggagacaatgaaggttaaacatttgacaagggaacaagttgcaagccacctgcaggtaattatcatatgtattctaatatatatgttcttgtaaaatacatatattgatgccagatgaatgcctcctagctagctagggtacgcacactatacacggtggatattgtctccctctttaaaaatccatatgttaatgtgaacacaaactaataaaattacaattattacgcatgtgctaagctaagctagctcaaatataattcgctgaaatacatatggatcgttatttcatttattttacatatacatactcccgtaatataattctgttgcttaaagatgctgccgccatttaaaaaaaaactgatgcagaaatacagg

SEQ ID NO: 6455 - DNA, 423 bp, Zea mays
gtcagtttcacctgttttgatgagtgacgagcagcaggtcgatgacgcccattctgctgtcaaggccattgagcacctgggcaataatctggctaacataaatcacaaatccctgcatatggatgtcctcatgttagaggacgcccaagttgcttccatggctgcagtccctgggcatgagggagaatctgtcgacgctggatcaaattcttttgatattttacttggagctctggctgaagagtccaaggcagcagatgctcctgggaaagatgaagttggcaaagcttccttgacattaataacactggctagcaatgagccctctgttacagaaggcagagttgtagacgtggtggaaacagacacaattttgggagcaggaaaagatgataaacaagttgatcaggcacatgacttcca

SEQ ID NO: 6456 - DNA, 651 bp, Zea mays
tgctgaagctgagagttatcagataaggaccaggaatgagaatgctgtcgagacccaaagccctccaaaaaatggagtgtcgttgttgtctaagccatatgttgataggagggaacagaatggtgattctgatctattggggcatggcctaagagagacaggtgtgaagaggaaaagatcacatcatgacgtggagcaaaacgatgatctgtctgattcctctgttgaatctttgcctggaatggagatttctccagatgatgttgtcagtgctattggtcccaagcatttttggaaagcgagaagagctattgtcaagtaagtatacaaaacttgagttcatgttcttggtgtttttacctattattgaacgtcctgtgtgagcataccatctcggcgactcctgtaatcagatagtgtttacactcgcttttgtttaacgtgcatacagtcagcagagggtatttgctgttcaagtattcgagctgcataggttgatcaaagtgagtctgcggcaaataaatataacttctttgggcccatgcttatgggcaggttaatttaaatttgaaaatttggtttaacggttgtttatgttgacttttgcaatcaggtgcagaagttgatcgctgcatctccacatgtacttat

SEQ ID NO: 6457 - DNA, 610 bp, Zea mays
tgggagagcttatcaagagaccgaacttgtcaactgcaaaagctgaagtgcgtgacttgaatctatcttttccggacagggctatactgtagcaccctaatgtatttgctccgtgtcttttagggtagcatgtaaagaggccctaacgagttacaacagccttgataacccagccgcaggtgcgccagtagaacagctaaatgagctcgaggaagttttcaagaaggctgcaaagactgatactccagcagaagtcctacactgcctcactcaatattttatttcgctctgttggttttgtctgtctggtctaagtctaaccactcagcctatcttatttgcaggtacctgaccatctctgttgcaaaatcacacttgatatcttcagagacccggtgatcaccccgagcgggattacctacgagagggccgtacttctcgaccaccttcaaacggtaaccaacacaagcgtctgacagtttgttgcaaagcactcgtggtttttacataccaagcttatgaactttgtaatctacatgtaggtggggaggtttgaccccgtgacccgtgaggctcttgaaccgcaccagctggttcctaatcttgccat

SEQ ID NO: 6458 - DNA, 588 bp, Zea mays
  misc_feature (566)..(566): n is a, c, g, or t
  misc_feature (577)..(583): n is a, c, g, or t
ggctcttctctggcccccactcttagagcacaatgcccaggtactgatacaaactcatgccagctatatataccttactgtttctcacagtaaaatacggtggtcattttatgatatctacaattatttttccatacacgtactgaagccaaccatggttactgtttggaactgaaaattattccaactctttgctttatctgttgaagcaattctaccagcaagaatccgcaaaactgcgcaaccagatccaaatgctgcaaaacactaacaggtagagctaggagccttgtgcagtaatttactttctatatactactgagtactgacaagaggaatgcaagtgactgcatggaagaacgtactgcccttacgcgtgttttgattatttctctcccttgtgattgtgaaggcacttggttggtgactctgtgggaaacttgtcactcaaagagctgaagcagctggagagccgccttgagaaaggcatctctaagatcagggccaggaaggtaagaaatgtgtaacattatccaaaccatcttcaagcatactaagcatgcatntaactactaannnnnnntaccc

SEQ ID NO: 6459 - DNA, 483 bp, Zea mays
agattcaaggccatcgcttatggcggctggagttaacaggccccctccacctcctccaggatttccaccgtctcaaatgccaatgccaccgtatggtgtgctccctggtccgccgccgatgcttaggcctccatttttgccaggacctcctatgcaactagatgagtttgctgcctttgccccaaggcctcagttacctcagcagccatcatacgtgaagtcggctgccccaacagttgtgaagagaccattagcacagcacactcctgagctgacggctatggtatgccatctgtcatcatattttttgcgtgatcttttttttcctttttccagagatccgtagtaggattgctcattctgccttgaatcactacaggttcctgcatcagtccgtgtcaagagagaatctgctctccccaagccaaaaccaaaggtgcagcagcagccacaactatcaacagtatccatttcaaagccctc

SEQ ID NO: 6460 - DNA, 437 bp, Zea mays
cctgcttctgttgtatctgctggtttacagtcagggcagccattcccagccaatcctggtcatatgagtgctcagcaccagattgtctaccaacaagctcaacaattccaccaacagctccagcagcaacaacagcagcagcttcagcagttctgggttgaacgcatgactgaaattgaggcgacgactgatttcaagaaccacaacttgccacttgcgaggataaagaagatcatgaaggccgatgaagatgttcgcatgatctcagctgaagctcctgtagtctttgcaaaagcttgtgagatattcatactggagctgacacttaggtcgtggatgcacactgaggagaacaagcgccgcaccttgcaaaagaatgacattgcagcagcgatcactaggactgacatttatgacttcttggtcgacattgttcc

SEQ ID NO: 6461 - DNA, 421 bp, Zea mays
ctcgagcagccccaacctcgtccagcagctggtagagaaatcgtctgatatgttaagatccgtgctgaccccacctaactttctcggccgattacataacttagccccctgataagagggtgcctaatttacgagaagcctggaaacaaatcaaagctgccatggcaattcaatgactgaagtgttgttgatgaggctgttttcagtgcaccgctataggtctgggtatccatggccacgctgtggtttcaagaccagagttggcggatagttacgtacacaggcggcaaatgtgtctcttagccgctgtttcagtgcaccgctgtaagtttgggtgtccatgtccatgctgtggtttcaagatcagagtccatggcggatagttatgtacacaagcgacaaacgtggttcttagcttagg

SEQ ID NO: 6462 - DNA, 372 bp, Zea mays
gacggcggcccgcagccatagaagtgggcatatgggctactatgctaatcctcaaagcgtgaggggggggcatttacctcgtagtttgtcatttgagactgatctcctgttttttgtcacttcagttcttcttttgcttccctttttaacttggctttgtaactttcaccttccttggatcgtgaaaagcgctgtggtgtgtgactgtgtggatggatttggtgcgccgctgatgcatatcatcatgtgatagaagaagccagtatccgtcgaggattactgcgagtatcgcctgtttgttgttcatacgtcatactgctgcactgcacttcactgtttgtgtgcccgttgttgcattgtatggttcggtta

SEQ ID NO: 6463 - DNA, 395 bp, Zea mays
cgttgggcacggtgatcacgcctgcacgggcgaccggatctgctccgccgcctatggtgggcgtcgacaggtccatgctgctggagcttgcgatcagcgccatggatgaactagttaagctggcacaggttgacgagcccttgtggcttcccagcctcagtggctctcccgacaagaagctgctcaactttgaggagtatgcccactcgttccctccgtccgtcggcgccgtgaagcctgtgggctatgtatccgaggcctctagggagtctggcctcgtcatcattgacaacagccttgctcttgtagagacccttatggacgtggtttgtatcctgttcatgcatgtttttgcaatttcgcttggtaccattgttgctccatgactttttttt

SEQ ID NO: 6464 - DNA, 375 bp, Zea mays
cttcccggcccccgcgctcgtcggcgaggaggagcgagccgagaagaaggccaccacgtacccgaggttcgtgttcgaggactacatgaacctgtacgcgcgccacaagttcgaggccaaggagccccggttcgaggccatgaagtcgtcggccatcgccaccgcgtgagcacataatactgccgtgttttctcccttcgtgtggggtgcatatgcttgagcttgaagagccatgtgcttgtatgtagtggcacgtacggtggttatgcgtgtatcgtggaatggcgcggcgtgatgtattttggttgtctcagatctaagtgtgtgcgtatatattgtgtactgtaaagtttgcagcgtctggttaatgtatga

SEQ ID NO: 6465 - DNA, 413 bp, Zea mays
aaagggaacttctcagaatcatgtccttctatagcattgtgaatgacaaccatgaactttgtcaatgcatctgggcccttgagtcggcaacaatttccaaacacttctccaataagaaacttaccgacaacttcctctctagaccatcctgtaagtttttccatggctgtgttccattctgaacaagaagtgttctcatctgatgcgaaaattgggggtagcagaggattaggattgtgtacaatagctttgtagtccccttgtatgttgataaatttatccatgaccaccttttgtcctgtaacatcttgtccaacaaaacagacaccaacaatattttgtgtgtaatctctgctggaacaagcattgacaataacaaatattgcacccttagattgctctgacccaaatgt

SEQ ID NO: 6466 - DNA, 330 bp, Zea mays
gatcgagcgcgtctggtaccaacaaggaccctgtgtacatacagcttatggtgtgctgatgatgtctgtactgtttccctgctcttctgacgaatcgcaatcgcaatgcagtcagaaggagcagaggagtgtgcttaggttttgagcggctgtctctgcacatttggcgctaacacggccaaggtagccttggcgccagatatggcacttggtgcggacgccctcttataagttacgtaagataagaaccacatggtgtaataaacagcagagagcctgctgagcgtttgaacctgcagcgatgtcaatcaagttgccgtgtgatgttta

SEQ ID NO: 6467 - DNA, 650 bp, Zea mays
cgagagctgggaaactccctggcgacactgcttctaccttaaaagcatggtggcaggctcattctaagtggccgtacccaaccgtaagtgaacacattgatcctatcactcccagcaccattcctagttactcatgagcatattattacgttgaacacatggatcctatcactcccagcaccattcctatttactcatgagtatattatcgtggaccacttgtttaggaggaagacaaggctcgactggtgcaggaaacagggctacaactgaagcagatcaataactggtttatcaaccagcgtaagcggaactggcacaacaattcggcgtcatcctcgtcggacaaaagcaagagaaaaaggtaatatcacaagaaactagactaagcttctgcttccacatccttgacacctttctggtttctgtttgctgtatgcttatgcttgtaataaaggaacactgcaggtgatgggaacgcagaaccagcctggtagggcatggtcggggaacgaagtttatgtaaataatgccttctactgtgaagagttccatcatatttgttgctccagaaaagaccctcagaccggtgtttcctgaacccatccatattcatacaaagacatcagacgatgaataatgttgcgagt

SEQ ID NO: 6468 - DNA, 582 bp, Zea mays
tgttcttgtgagggcagttctgcggcttaccgactcgttagcgcgagaagcgcagccgattcatggcggtgatccggaggacatcatccacaagctactgagatcagctgtaagttaaacgtaacattcagaaggtttttttttggcagttaacaagtactacgacatctatcgtttttgttcagcatgcacagtcatcctaatagctaataccattattctctctgtgaacttgtgtagtgggctgaatgggtcagggagaaggcagatgcagcagacaacgacgtgtgtaataatggatccagtgctgtggaacaagaagggtcgcgcatggttcatgacaagcaaacgtgtttgcttttagctcgaatgatcgagatcagcgctgggcgagctgcaggtgaggctgcgagcgaagatggtgaccgtcggattatccagctcactgggtctatatgtgacagtctcaagcagaagatgctagtatctcaggtatagcacatgtatatactactacagaaagtttgtgcgtagttattatttcccttttttcatgtgacgaacatgatgacctgatgatgc

SEQ ID NO: 6469 - DNA, 470 bp, Zea mays
  misc_feature (281)..(281): n is a, c, g, or t
  misc_feature (293)..(293): n is a, c, g, or t
tcttatcgtcctgtggtgacgtagtgtttggcaaccggctgataaacgacgaactgaggcctgaaccattgctattgcgtgaccatgctgccgctgctgtctcgcagttgaatgctgaccaacggctcattttcgaaaggctgactgaatctgcgctctcctgctcgccgggcatatttttcgtatgtggacatggtgggacgggtaaaactttcttgtggaacgctatactcacgcatttgaggtcccaacaaaaaattgtgcttgctgtagcgtcctcnggcgtggcttcnctactattaccaaaaggccgtactgctcattcacgtttcaaaatacccttcgatctagatgagagaggtgtatgtggtgtcaagagaggtaccatgctgtctgaacttatacagcgaacttctcttgtcatatgggacgaggcgccgatgacccatagacattgctttgaggcccta

SEQ ID NO: 6470 - DNA, 503 bp, Zea mays
tcggtcacctcagggatgcaggtagccacgtccttcacctagatggcgggcgagcagcagtggtaccccaggtacgaccatagtatgatgacccagatgctgtggacttcagggacatttcaacctttttatttccgatcatcacctagctgattaactaaataagctgtcaattgttctgcaggtaccaggaccaggaccaggaccaggaccccatgtcgttcatggacatcaaatagcacaagccgaagaacacaataagatactggaagtggcagctagtactgttataccaacttctaaggcagggcaaccaccaactttccatggagtttagagtgatcaaaatcatgccttaagctgtatatctgtacagaagtgtcagaaccatattctttgacatgtaagcttagttctagagttattatcaggagtcttgtataggttacaagacaacagcctgtctaccgccgtattctatctacggaagaactcgagctgca

SEQ ID NO: 6471 - DNA, 357 bp, Zea mays
cacagctggtgatcagcctgagtcaagaacgaaccgcgcaaaacagtagtgacctttgctaggtggtacgggtccatagggctggcccgtagcacacagcaatggcggtggttcgggtattgactcagcctccaattgttctgggttaaattttgcattttggacgtacgactggccgggcaatgccatggttggttttggtggttttagggagtctggagtcatcggtgctttttgttggctggctcgtggttttttggtatcaggtttgcttttgtaaccatagatgtaggagagccccccttgatgatacagtcaatatcagacaaatgcagcattgtatcgtgagattcagta

SEQ ID NO: 6472 - DNA, 414 bp, Zea mays
  misc_feature (19)..(19): n is a, c, g, or t
acgggcgcgacgaatccgnccatcgatccaacgccgagcgcgcgttggaggagggacctgccaggccccacctgcagtgagagactatagatagatgccttcctctctcgatcacctgatggctgatgccttcgccgccgtcttcgcctgccgctgccgctgctactactagttgccttgctcgcttccccccctctcgccccagccgcttccgccctctcccttccgtttccttcccaactcccaattcccaaccctggatccaaatcccaagctatcccggaaccgatacggaggggcgcaagcaattattagctggctagcccggcctgtagctccgagatcatgaagcgcgagtaccaaaacgccggcgggagcgacggctacatgggctcctccaaggacaagatgatg

SEQ ID NO: 6473 - DNA, 376 bp, Zea mays
ctgacgtgtgtatgattattttggtgaattgtggaggaaattagtctcacctgttggcactggagtgaatggtggaaaccaaccatggcccttggctttaggatggttgttggtggtgtagaatacatacacatcgctgcccccgttttgttttgttttgttttgttttagggccttgtgggggcggctgtatataatggaaaaacatttgatccattactgaggcatggcccgagaagacaccttcaaatgggcttctgtgtaagcttgcttatttgagaagtaggaagccatgcagtagattttgtatccaaaagccgtgtacttgtttttgtctgatatgtaatctagcgcatgtcacacatatgtattccct

SEQ ID NO: 6474 - DNA, 382 bp, Zea mays
atacgcgcccgctcatcgccacctcggcgtggcgcgtcgccgctccgtgacgtgcccaccgtccccgtacctcgccggcacagcacagcacagcacaaaagcacagtggaaggctggaagctaagacgtcagtgaacgctgctgaactgcagatagcgactgtggggccacaacggtcctcgccggagcgacgagatggacacttggagtccgaccggatcggcctgtgttcgttcctgtttccggtccccctctctcttccccgttgttccttcaacccgtcaactatggtagcccgtagccctactgctacgtttaaatgtgtattactattacgtgtaattcctccaagcgctgatatccaataaggacgaaccggatt

SEQ ID NO: 6475 - DNA, 720 bp, Zea mays
cagtccctggagaatcaattggaaacaagcctgcgtggtgtccgcgcaaagaaggtttgattcttaatcaaatttctataatcaattgttcaataaattactaaagatcgttactactgttgatgctcttaacaggaccatctcttgatagatgagattcacgatttgaatcgaaaggtctgtaatatggtgaatttatagttctgtgttatgtgttttatttgatttagtagcactgactaaccactttgttggtcacaggcaagtttatttcaccaagaaaatacagacttgtacaataagatcaacctgattcgccaagaaaatgatgagttacataaaaaggtagctgatgaattgaataaaaataccactaagtaactgcctaaccacacatatgacatgatattaattgttctcagatatatgagactgaaggaccaagtggagttaatcgggagtcaccgactccattcaactttgcagtagtagaaaccagagatgttcctgtgcaacttgaactcagcacactgccacagcaaaataacattgagccatctactgctcctaagctagggtataacatttattctctctatatatttcaattggttaactagtgttgactacagtgctataatgagttgctaaacacatgcagattgcaattaattccatgaagaagagtaaaactgccgtcttatgatgctgaaggaaact

SEQ ID NO: 6476 - DNA, 382 bp, Zea mays
ggcgatgatggctatgtgacgcatgttatcggaatccagctattctctgaggcgaacatcgatctcagcagcgtatcgtatccggtgtacaagcaaaagtccagcagcaggcccagcattcaagatctgaactcatctccccacgagcacgctccgaaaatccagagtgcagaccactgcggcatgcttcagttgtcagacgaagttctcgcacacaacatcctatcccgcctgtcaccaagagacgttgcgtccatcggatcggtgtgcaccagaatgcatgagctgaccaagaacgatcacctgaggaagatggtctgccagaacgcgtggggaagggacgtcaccgtgaggctggagatgagcaccaagatggtaggat

SEQ ID NO: 6477 - DNA, 385 bp, Zea mays
tcagaggctcccttatctgttagcttgactgatcaacaagatgcgcagcaccctgctaatggttcattgaagatggacaatgaaatacgagcaatcacacctcagggtggacaggtgacaggtgctaagaagcgcaagtctggatgtgtaagaaggtttaagcaggatgaagtaacacatgagcaaggagatatccgtgatcgaacaagtgacaagccaggcaacgagactgttgattccacagaaggagatcctggtgataagaacaaaggggaggactctggtaaccaaattcatatgcctaagatcattaagatcattaagccagtgcgctattttgccacagttatggatggtgtgcagcaagttgcaataacattcaagg

SEQ ID NO: 6478 - DNA, 398 bp, Zea mays
aacaaactttatttcatgcaatttagaagctaaataaatttccatatattattctagtttcatcatcaatattccttacatgtataagtaatcctcccttaagccatatttacaactaaggacaatgagtaaatttaaaattaagaatgccaacatgtaataagttaaatttgtatagatactatctttctaggcacttgtacatgcaaatggaatatcaaatgtttcttaagaaatgtatagatactatctttctaggcacttgtagcaatcatagactctactttgttttatgaccattaatttataataagttaaatttgtgattgtacatataatcacacattccataaaatttatttatttttacatgccaacatgttgaactaatgacacca

SEQ ID NO: 6479 - DNA, 391 bp, Zea mays
cgctcttctggcccgagcgtggacgccagggtggcagaacgcagacaaggcgctgacggccttcctcaacggcccactggccgactactcagtgaaccgcaagaaggccgatagcgcgagcacgtccctgctgtcgcctcacctgcacttcggcgagcttagcgtgcgcaaggtcttccacctagttcgcatgaagcagctcgtgtggagcaacgagggcaaccacgctgccgaggagagctgcaccctgttcctccgttccatcggcctgcgggagtactcccggtacctgagcttcaatcacccgagcagccatgagaggcccctcctggcgcacctcaggttcttcccctgggtggtggacgagagctacttcaagatttggaggcag

SEQ ID NO: 6480 - DNA, 577 bp, Zea mays
attgatggatgtggatgtgctcatctgtggtgaagaaagctttggcactggtaatatatggcttgtggccttgtgggttgtggctatcatttctatacacacaacagtaaacatgtcagcaacctcttgtattgttatgttagatgggtaaattctgttaacatgtggtatataaatggggccaatcacttgtgttctgactgtgagctctctcgcccttctattgagttggtggtcatgaatccaacctatagtaaagtcaaaggacttgttagtatttggtataaacattggtgggatgtttacatgtactattgtggccagggtctgaccacattcgtgagaaggatggcatctgggctgtgcttgcatggctttcaattattgctttcaagaataaggacaaccttggaggagataagcttgtcactgttgaagatattgtccgtcagcactgggccacatatggtcgccattactacacacgctatgactatgaggtacttccttttttttgacatgccccttgcatatatgtaccacctgtttaagatatcattctaaatgcacaagtttt

SEQ ID NO: 6481 - DNA, 406 bp, Zea mays
gtgacgacgccatctgcattcacttttctgttcactgacagaaggcactcaatatatttgccatcgcggtcaaagaaaccgattggagccttctctgcctcttcaccagctaatgcgctgttgatgataatgcaaagacgtacgaaagcgtctttgctcttcagaaggcaggaagcattgctgctgtcgaaaacctcgccaaggagcatcctgtcgatcacctcatctctgtgccacccagtaagcttggtcatggctgcgttccactcagagcaccatccgaactggtcggcaccaaatatcggaggaatgagcgggttcgggttgtgaatgatggccctgtagtccccctcaacccgggtaaatttgtccatgaccaacttgtgaacagtcatatcctgggcta

SEQ ID NO: 6482 - DNA, 620 bp, Zea mays
cagcacgatgaaaggtttcaggaaaaggaagaccatggcaatccagttagcatggatgtccagcagctgcattcattgttcgatgttgcagtacagaacaatcttacttcccttatttgccactgtatcctcttcaggaggctgcttatgcatttctatatcacatcttctttctgttattttcttaacatattcaccagatatcacagatgtttgtttggatgagaatgctgtgtcaagtgatccacttctggcttttcttttggatgaggtggtcatcaaggactggtgcaagagggctgttaatgtgctcattactgagattggtgtgatctgtatccaaaaatgttcaatcgaccctagattcagttacatgcttttttttatgtttcgtttttcatgtgttcagggccacacatgttgagggagtggtactgctaatctgttaagtcactaaccttaacgatatcttagataggtctggattagaaacgatgagatctaggttatcccaactgcaaaagtttgccacacagttggcaggaatttacagtatacttgaagttatggtttcatctttcaatgaagcagtttcagcgcatgttaatgacctgcaccaa

SEQ ID NO: 6483 - DNA, 586 bp, Zea mays
catggtacaggtacagaggttcacccttgctgagggaaatacattctgtatgttgtttgtcacactgctgtagtgtatttttagctagcagtttaatccttggtggtatactccaggaattggaagctctggctggcaagcacccgaacagcttcgtcatggtcgtcaaactcgtgcaatggatctttttagtttgggctgccttattttctattgtatcactaaaggcaagcatccgtttggtgaatactatgaacgggatacaaacattgtaaacaatcgctttgatctctttgtggtggactacataccagaagcagtacatcttatatctcaactgttacaaccaaacccagagacaaggtaagaactaagaactaaggtctgtgcagcctaaattcccttattttcataggttatgtgagtgttcttgctttatcgaaaattgactcttttttaatgttaacagaccaacggcagtatacgtcatgcatcatcctctcttctggagccctgaattgcgcctttcgtttctaagggataccagtgacagaattgagaaaaccagtgaaacggacctcataaa

SEQ ID NO: 6484 - DNA, 1361 bp, Zea mays
  misc_feature (755)..(774): n is a, c, g, or t
  misc_feature (785)..(785): n is a, c, g, or t
  misc_feature (787)..(798): n is a, c, g, or t
  misc_feature (800)..(810): n is a, c, g, or t
  misc_feature (816)..(816): n is a, c, g, or t
  misc_feature (821)..(822): n is a, c, g, or t
  misc_feature (825)..(827): n is a, c, g, or t
  misc_feature (832)..(833): n is a, c, g, or t
  misc_feature (839)..(842): n is a, c, g, or t
  misc_feature (844)..(844): n is a, c, g, or t
  misc_feature (846)..(846): n is a, c, g, or t
  misc_feature (850)..(850): n is a, c, g, or t
  misc_feature (852)..(852): n is a, c, g, or t
  misc_feature (855)..(855): n is a, c, g, or t
  misc_feature (857)..(864): n is a, c, g, or t
  misc_feature (867)..(869): n is a, c, g, or t
  misc_feature (872)..(874): n is a, c, g, or t
  misc_feature (876)..(876): n is a, c, g, or t
  misc_feature (878)..(887): n is a, c, g, or t
  misc_feature (891)..(892): n is a, c, g, or t
  misc_feature (894)..(902): n is a, c, g, or t
  misc_feature (905)..(908): n is a, c, g, or t
  misc_feature (914)..(917): n is a, c, g, or t
  misc_feature (923)..(928): n is a, c, g, or t
  misc_feature (936)..(940): n is a, c, g, or t
  misc_feature (948)..(950): n is a, c, g, or t
  misc_feature (959)..(961): n is a, c, g, or t
  misc_feature (964)..(966): n is a, c, g, or t
  misc_feature (968)..(968): n is a, c, g, or t
  misc_feature (977)..(980): n is a, c, g, or t
  misc_feature (982)..(987): n is a, c, g, or t
  misc_feature (993)..(993): n is a, c, g, or t
  misc_feature (1000)..(1003): n is a, c, g, or t
  misc_feature (1022)..(1024): n is a, c, g, or t
  misc_feature (1029)..(1034): n is a, c, g, or t
  misc_feature (1036)..(1040): n is a, c, g, or t
  misc_feature (1042)..(1049): n is a, c, g, or t
  misc_feature (1052)..(1066): n is a, c, g, or t
  misc_feature (1068)..(1074): n is a, c, g, or t
  misc_feature (1076)..(1105): n is a, c, g, or t
  misc_feature (1109)..(1110): n is a, c, g, or t
  misc_feature (1117)..(1119): n is a, c, g, or t
  misc_feature (1121)..(1123): n is a, c, g, or t
  misc_feature (1128)..(1138): n is a, c, g, or t
  misc_feature (1142)..(1145): n is a, c, g, or t
  misc_feature (1148)..(1148): n is a, c, g, or t
  misc_feature (1152)..(1154): n is a, c, g, or t
  misc_feature (1157)..(1160): n is a, c, g, or t
  misc_feature (1164)..(1166): n is a, c, g, or t
  misc_feature (1170)..(1173): n is a, c, g, or t
  misc_feature (1175)..(1175): n is a, c, g, or t
  misc_feature (1177)..(1187): n is a, c, g, or t
  misc_feature (1196)..(1206): n is a, c, g, or t
  misc_feature (1209)..(1209): n is a, c, g, or t
  misc_feature (1212)..(1221): n is a, c, g, or t
  misc_feature (1223)..(1224): n is a, c, g, or t
  misc_feature (1226)..(1230): n is a, c, g, or t
  misc_feature (1232)..(1239): n is a, c, g, or t
  misc_feature (1241)..(1247): n is a, c, g, or t
  misc_feature (1249)..(1250): n is a, c, g, or t
  misc_feature (1253)..(1260): n is a, c, g, or t
  misc_feature (1263)..(1272): n is a, c, g, or t
  misc_feature (1275)..(1279): n is a, c, g, or t
  misc_feature (1282)..(1293): n is a, c, g, or t
  misc_feature (1295)..(1296): n is a, c, g, or t
  misc_feature (1298)..(1314): n is a, c, g, or t
  misc_feature (1319)..(1321): n is a, c, g, or t
  misc_feature (1324)..(1340): n is a, c, g, or t
  misc_feature (1342)..(1344): n is a, c, g, or t
  misc_feature (1349)..(1351): n is a, c, g, or t
  misc_feature (1354)..(1355): n is a, c, g, or t
  misc_feature (1357)..(1357): n is a, c, g, or t
ctcttcagaactgtaggcattgactagattctgcagttcatggctgttgcatgtttaaaactcaatagagattcaaatgttacttatttcacacgcatttcttcacctgcaggcaacaatcccgggtttcatagctagaggaatgtctgtcgctgaggcagaagatttactgcgaacaagtgtaaaactggccaatgaagctcgagatgaattttggaagtcaacactgaggaagtccaaacctatttacaaccgtgctctggttgctgcatccattggtagctacggagcctatcttgctgatggatcggagtacaggtaacacgaccataccacacgaaccatgagatagtcagacaacattagattcagggccttttttgtttgtaatggtagttacttgtacattatagagcatgtcctcgttctgtatgcctgtctctcacacgaattggtcttgcagtggatcatacggtgctgacatcacagccgagaagctgaaggacttccacaggcgccggctgcaggttcttgcaagtgccggtcctgacctgattgcgtttgaggccattcctaaccaaatggaggcacaggtactttgtaaatcagagctccatgtgaatgaactgaaacatgatggtttaagaaacaaaggtttgaactgcagttgtgcatgcctggtgttgaaactgatccctttctcttataggcattggttgagcttctggaggaagagaaagtccagatcccttccnnnnnnnnnnnnnnnnnnnncacccaccccncnnnnnnnnnnnncnnnnnnnnnnnctcccnacacnnctnnnttttnnctcccnnnntntnttantnttntnnnnnnnntcnnnttnnncntnnnnnnnnnncccnncnnnnnnnnntcnnnnatcttnnnncccccnnnnnnaccccccnnnnncccccccnnnacacccccnnnttnnncnccccccccnnnncnnnnnncatccncaccccnnnnttcccaccccttttatacnnntcatnnnnnnannnnncnnnnnnnnttnnnnnnnnnnnnnnncnnnnnnncnnnnnnnnnnnnnnnnnnnnnnnnnnnnnntttnncactcannncnnncatcnnnnnnnnnnnattnnnnctnactnnntcnnnncacnnnatcnnnntncnnnnnnnnnnncccctctcnnnnnnnnnnnccnaannnnnnnnnntnncnnnnncnnnnnnnncnnnnnnncnnacnnnnnnnnccnnnnnnnnnnccnnnnncannnnnnnnnnnntnncnnnnnnnnnnnnnnnnnccatnnntcnnnnnnnnnnnnnnnnntnnntctcnnnctnntnaaat

SEQ ID NO: 6485 - DNA, 261 bp, Zea mays
  misc_feature (233)..(233): n is a, c, g, or t
caacagcaacagatgcagcaaatgcagcagcagcagcaacagatgcagcctcaacagcagcagcaaccccagatggtgggtacaggaatggggcagcagttcatgcaggggcacaatcgggcagtgcagatgatgcaagggaagattacgccacaggggccgggcagcatgcctgggggaggcttcctaccttaagcaccttttatcagcaggcatcagatgaattgagggtntacactgaccaagtgtcgagatgtcaac

SEQ ID NO: 6486 - DNA, 315 bp, Zea mays
  misc_feature (158)..(158): n is a, c, g, or t
cggcgatggctaccggagctggcgaggctgccgacggaatggatacaccacccctgggatgcacctgagtctgtgcttcaggctgcaggagtcgagctaggctccaactacccacgccccattgtggagttagatgcagccaattccaggttgcaggntgccctgtcagagatgtgggagcttgaggcagcctcttgtgctgccatggagaacgggatggaagaaggcctcggcgattccacagatgagccgccgatcgacttccctcaagaattacggatggaagtggaccgacaaccagctcaacctgctatc

SEQ ID NO: 6487 - DNA, 580 bp, Zea mays
tcaatttcaattcttgaatgtcgattttatcaagagattattgtgtctatcctgtggatatatattccttaagataactagcattgatgggcctatgttgccaacagtatgataaaatttctagtggatgtccatcatttcccagctgatgattcttgtactgaaatctgaagcataaaactatactggagagaggatttggcagggtacagtacaactgatgtacagctgaatattttaaaaggacatgtgatgtcgatatatacagctgaatattttaaaaggacatgcaacagtcggtttttttagaagcttcgttcatttcaaaacttgaaaaaaaattatatgtgaatgtataggtgatacaccatttggtagttttgatgtagcagtagtgatactaagattgtctgttccggacctaaactgcagcgagtaaaagctgatgcggatggcctgtcaaagagacttgaagcacttgaagcttacaaaaggcaattacctagctatcaaatactgatatccttatgtacctgcccacggactaatcttcgttgagaggcggtgcaggaaacttttg

SEQ ID NO: 6488 - DNA, 845 bp, Zea mays
cgaaagactgagactcgaattacgtactacactagcatcatttcatggcatttaatcaggtgtccgaattgctctttttctaggtggattcgacacggcgcaggccgctgcgaggttcatagatttcttcttcctcgcgcgcatctgttccattatcttctcgtcttatcttatatatctatctatctatgaatctatctgcagggcctacgaccaagccgcgatcaagttccgcggcctgaacgcggacatcaacttcaccctggacgactacaaggacgagatgaagaaggtgattccccccctgttgcaattgcgaatcgaacgaccaacaccggtagaagaaggagcccacacacaccgccatgaatggagtgtgaatagaacaaattaagaacactgcagctgctctgttcatcgactaataataacgtctctctcttagtctctttcactgtttgatgcctggattcttgtcttcctgccgtgtgccgcgtcaaatccctcagatgaaggacttgagcaaggaggagttcgtgctggtgctccggcggcagggcgccggcttcgtcaggggcagctccaggttccggggagtcacccagcacaagtgcggcaagtgggaggccaggatcggccagctcatgggcaagaagtaattaattagtcaatgctgaatcggaaaaaaacaaaacaacgattagtgccgatttttttgttttatttttatttttggcttgatggttgatctcctttgttcttgtcgctgctgcaggtatgtgtacctgggcctgtatgacacagagacggaggctgcccagtaagtgacgcgtcctctgtgcttc

SEQ ID NO: 6489 - DNA, 379 bp, Zea mays
acccactgaagcagagctgcaggacatgatcaacgaggttgatgctgatggcaatgggaccattgacttcccagagttcctgaacctgatggcaaggaagatgaaggacaccgactccgaggaggagcttaaggaggcctttcgcgtcttcgacaaggaccagaatggtttcatctcggctgctgagctccgccatgtcatgaccaacctcggcgagaagctgactgacgaggaggtcgacgagatgatccgtgaggccgatgttgacggcgacggccagatcaactacgaggagttcgtcaaggtcatgatggccaagtgaggagcgatccccgttatctatgaatgaattgaagtgaaatatcaggcacacaagctg

SEQ ID NO: 6490 - DNA, 716 bp, Zea mays
ttgcctcactgccgaggaaattgaggcggatataatttcattggcgcaatcagaaggtattgaagcttgttgccttgagatgctctcaacagtaacggaagggttcttggcgctttctttattaactgtaatactagcgaccaagtagtaatggtgaacaatctagctccagcattaattttgacgagtctatttttactgtttagcagattctgaagtttatgatatctatactgtcaaggaggtggatgacacaatggaggccacgtcagcagcttcatatccaaggtgaataaccaaatatgaatcacatgtgttttattcaattcggctcatgtgagagtgtcttcttaatgagtggtcttgttacataaggttacaagtggatgatggagaagatgaatgctacgaagattgtccatatgacacagatgattccaatggtaaccgtaccatcattatttttcgttaactaatcagttagatccatagctgcttgaattagctgaagctctttccataccgaatatgcagccgaagacaatcctctttttgattatcctgatgaatcttccgaggacgaggatgatggtaggaacgacgaggatccttttggagacaaagaaggttctgactcagattacgagaaggaagaagtagaggtggaagaggatgagtaacggtgaagggaagttgtgatgaaacgtgcggttgta

SEQ ID NO: 6491 - DNA, 485 bp, Zea mays
gtctctcatggatcctggtccagaggtggagcctgaggaagcagaaaggcccgagatcatggccagtcatcggcgcaacggtggagcagctgaggaactaccaccggatgcacgactggcttgtcgggtacctgtcacggcacaggacagtgaccgtcgacatgccgttcacttcctacacctacatcgctgacccggtgaatgtcgagcatgtcctcaagactaacttcaccaattaccccaaggtaaatgacctgaactcactgatgtttcagtcttcggaaatcagagctgaaagctgaatcgaatgtgcctgaacaccgtgtagggaatcgtgtacagatcctacatggacgtgctcctcggtgacggcatcttcaacgccgacggcgagctgtggaggaagcagaggaagacggcgagtttcgagttcgcctccaagaacctgagggatttcagcgccattgtgttcagagagtactccc

SEQ ID NO: 6492 - DNA, 729 bp, Zea mays
  misc_feature (711)..(711): n is a, c, g, or t
atgttatgatagatcatgagcttcggaaactccggctgatagactggggtcttgctgaattctatcatcctggcaaggaatataatgtccgtgttgcatccaggtagctgcagatatactaaaaactctcattgttggttcaatggctaacagcagttaattcaggtacttcaaggggcctgagcttcttgttgacttgcaagattatgattactctttggacatgtggagtctgggctgcatgtttgctgggatggtatttacccacattactattccacctatttgctgccatatcctgatatcctcctttggtatctctgacggtttcttatagaaataactggtactgatttgctgttctgattgcagatttttcgtaaggaaccatttttctacgggcatgacaaccatgatcaacttgttaagatagccaaggttatcaattcagcctgcttgttgtttgcaatgaactgcttagctagctatgttgcttacttttgcaatgtcatgtagcttgcaagtgctgattattgttacatcctttatcaggtacttgggacagatgggctgaatgtttatttgaacaagtacagaattgagcttgaccctcagcttgaagccctcgttggaaggtatagcacgccactgctcactagactttttggtggcgcgcctttgccgcatttttcattaatataaggagaatcngttttttggggggatgca

SEQ ID NO: 6493 - DNA, 391 bp, Zea mays
ttgtgttgtgtgcgaagcttggaactttataaatcgttgtcatgcccatggctttctatttctttctcggagctgcgcaaaaccgtctccatttctgggcttctcaggacagctggacgcgggaagccggaaccaaaaactctgttccgcactcatctcctctgctccaggcttcaacatccgcgcaggagcgaaaacgcgtcccaaatccttttttatttgccagaaatttctgagccctaacccgcgtgcgcgtggtgcctgggccgaattattaggagatccataggctgtctcactccctctggccagcagcctgactgtgaactccagactccgatcgtctggtcctctagctctcatgtcatggactcatggaggctactactcg

SEQ ID NO: 6494 - DNA, 953 bp, Zea mays
ggtttgcttatcttcttttgtcatttgatagtcgcacggatgtctacttaactagttgtatctaaaagggtccttttccagacatgagaggttagcagtacatgaaccttcaaatattgtgataacgagggagatcatgcagtgcttgaataaccaggagtggctaaatgatgaggtattttccattttgttgcttctgaaactctttgcagagttaaggatacataatgtaatatatcagtataaattcttgtttttttttcttttccgactactttcaggctatcaatttgtatcttgatcttcttaaagaaagggaactaagagaaccttgcaggttcttaaaatgtcatttcttcaacacctttttctacaagaaggtttgtgttagaacttgttttaccttttggtgggacaattcttttttatttatttttccttgcttctaaaaactagcattctcatccaatgtgcatcatatcagtttgaaagatatgcatgcagttactacctgatgcattgtttcctagcatttatatgatatccacccaaacagctcagctgattcatacatgtgcctgcacatgagttgcccatttaatgacattctcatttttttgtattattattgtcatttgtcttctgtattcattaccatattttgttgcgattgtgacatgcgttgtattttagtgcaatgttgtgttaattataattcataactcatctctcattactgtctatcagctgatttccagtgggtatgattataaagctgttagaagatggacaacaaaaaggaagttagggtacagtctaattgattgtgacaaggtaaagcactttttggattctgttttcagctttagatcttactagggtttaactttgtatgcatttgaccgaaacttattatccagatatttgttcccatacacaaggaagtccattgg

SEQ ID NO: 6495 - DNA, 383 bp, Zea mays
ctgagaggacgctaccataggaatgggagcaggaaccaggaggaggagacggtactcgccccaaagtctccgtctacctatctaatcgttagtcgtcagtcttttagacgggaagagagatcatttgggcacagagacgaaggcttactgcagtgccatcgctagagctgccatcaagtacaagtaggcaaattcgtcaacttagtgtgtcccatgttgtttttcttagtcgtccgctgctgtaggctttccggcggcggtcgtttgtgtggttggcatccgtggccatgcctgtgcgtgcgtggccgcgcttgtcgtgtgcgtctgtcgtcgcgttggcgtcgtctcttcgtgctccccgtgtgttgttgacttgttgtaaa

SEQ ID NO: 6496 - DNA, 382 bp, Zea mays
ctgcagcagccaacatgggcatcactccattctaataactctggttaggcatgtgttctgaatcagctggcacgtcgtagtggctatcgccctttgtgctgcattctagggtttcgtctcagatcttgatctcaacatcgatcgtgtgtcgtttaattagagtactttccagtgtggggatagaaatggagaataatcaagttagagcgcgcacctagtaggccactgatgatccggtaggtacagacttgattgtctcctctaaatatcccttttcatttcatgttctctctgtttttcctattttttttgttcctggaccccttcaactcgccagtagagagctcgttgtgcctctccgatcccatgtttgcgtatgtct

SEQ ID NO: 6497 - DNA, 629 bp, Zea mays
gtttaggtcgtccgcttgtcgcctgaagagagaaaggaaaagatccataggtacataaagaaacggaacgagagaaatttccgcaaaaaaataaaggtaccattgagcatttcaatagagcggtacctccgcatggacatcttacgtattcagctgtgctgacagcctgacatacaacgaaatgcagtacgcatgtagaaaaaccttggcggatagcaggccccgtgtccgtggaaggtttgccaagaatgatgaactctgtgaagcagcgcaatcaggctcccagagtcatgaacattatgaacaaactgtaagttttcaattgaactatacacagtcttatcaaacgagaacctggaattaaaaagaaacatgattcttcttatgcattctcattgtttttaaacaagaacctggaatacttctatgcatagttaacaagatctcttacctttttttcaggaccatatgaaagaagaggacatgctggacacatctgacattcttgcgcaactaaatggattaaatccctacaactacaagtataaatccaccattgaatcatggatatgattctcaagtctcaaccacacaaaaactaagacccagtgtcttatttgaagttgtgc

SEQ ID NO: 6498 - DNA, 417 bp, Zea mays
ggctcatactctcatgttgctgtgggggcctctggagatgactatgacgcattagccgaaagtgttggtgatggccgtcttttctttgctggtgaggctaccacgaggcgttatccagcgacaatgcatggtgcttttatcagtggtttgcgggaggctgctaacatcacgctgcatgccaatgcccgggcgacaaagagtaaagtagacagaagtccatcgacaaacacacaggcttgtgctgctacattaacggacttgtttaggcaacctgatttggagtttggaagcttctcggttatttttggaggaaaagcttctgatccgaaattcccagctattctgaaggtggaattaggtgcgtcgcgaaagaaaaatacagccgaaggggtaaagacggaacagaaccactcaaac

SEQ ID NO: 6499 - DNA, 445 bp, Zea mays
ttttggatggtggtggcaacagggctatttgtacagggagaaatgaggctgaaacttgaaaaacactcagcaggtgagtctctctgtgtgtgtgtgacctgactcaatgcaaaacttgacacaaatcattgaatttggcacaaaatattcgtatcctaatagagaacatggctcatgacttttcaggtctcgactaacaggctgcagatgtgaatatcagcgccaactcatcctggaaaagagcctaacgagtttcaagatccacgaagcagatccgtcacttgataagactccaatcaatcaagacagggccatgacaggacgtctagctttagcgagctaagatgctcctaagttttgtgtcaaatgtagatggtagatggaacctggttacaagaaacatttcttggcagccggtgctttttctttttttcttttggcttca

SEQ ID NO: 6500 - DNA, 522 bp, Zea mays
agtgtgggagcacggtgccaacttactcggctacgagaggcactctcctcaacagcaggccccatcacatgttggcaatggtttgttctttcatcccctggaagctgcagcagagccaaccctgcagatcgggtatgtcatcatatgcctccagatgcatcatgtgattcgctatatcgtacataaagcgagcctgtgcatcgatctgatcatgtcttgttgttgtgtttggcatatgcatgtttgcaggttcgctcctgagcatatgaataacttcatgccaacatggctaccctgaagatggatcttgaggcaaaggaaataaataaagatgcggtggcagcatcatactctatgcaagctaagagtgacagctgtgtttcagtcacatatatgatctagtctgtgtgtcaatgtgtcgaaaaacatgtctgtgattttgttatatgaatgtaacgcgcaatgaaacatacaggactagctgcttgcttgacgatgcgtttgcgtgtatccgtataaatt

SEQ ID NO: 6501 - DNA, 407 bp, Zea mays
cagtttgaagcaagttaagcaaccgcccttctcgtttgtgtcgtgtcgtctcgtcattcatgtgagcagcatccgtggtgaaattccgccatcgctatttttaaatgatggcgcggaatttcgatgggtcatcaccagttggtgaacgaactagggaatttattgtgtcttgtaagatacaactttactgggttgtctatcaaattctgcgttggctcatcgtcatcgctttactggggctaacaatatagttgtggtggaaatctgccatccatgcttccatagcaagctcttagatgatcggaataaaaggggattttgatgggccaatcaggaagtgggtttggttaatctatatatatggagcatatagcttatgcagctgttcatccacatggtttcagtgt

SEQ ID NO: 6502 - DNA, 595 bp, Zea mays
tctcctattcaagaggaaagcattcctattgctttaactggtagtgacattcttgcaagagcgaagaatggaactggcaagactgctgcattttgtattcctgcactggaaaagattgatcaagaaaaaaatgctattcaaggtctgttctatactctggatttttatttgatatccaacggatttgaaagattctaagatgatttaacttgatctcttccatagtggcagtggtgttatttttttcattactcaggtttcttttttggcgtgcatgaatgttctttgttttttagatgtaattttcattgtatatttcatgaaaaagcttgaataaggtctctttatgatttgcagttgttatattggttcccacaagggaattggctctacaaacatcacaagtttgtaaagagcttggtaaacatttgaagatccaagttatggtcaccactggtggaaccagcttgaaggatgatattgttcgtctgtaccaacctgtgcacttaattgttggaacacctggccgtattttggatcttacaaagaaaggtgtttgcattttgaaggactgttcaatgcttattatggatga

SEQ ID NO: 6503 - DNA, 517 bp, Zea mays
ttcgccgaacggtattttatactagactttgtttacaatagtaaaactgatctacagcatagctaggttgatacaccgtagccagctcgggcatatatatactctatatatcgcatgcacagcagggataatcatatggacgttcttatttagctgaaaaactgtctgtgtaggtaggtatgcctatatatatatgtgtcttccgatccttgtactcttctgcacaacagattcagccgttcaccttaatgtctaaagtattcgccacattctcatggactgcgcaggagcgtcacctgggagaaatgaacaggcaactcaaacacaaggtccttatctctgtttcctatagtcgaacgatctagagctgtatatactcctataattaatattcgcttgatcttttgctgttgttaacatggacactgtttcttaatttgtttactatctatctatatatatatgttatatgttgtccaattcgacagctcgaagctgaaggctgtagcaactacac

SEQ ID NO: 6504 - DNA, 524 bp, Zea mays
tgagcagcctgaggcaggagttctccaagaagaagaagaaagggaagctgccgaaggaggccaggcagaagctcctccactggtgggagctgcactacaagtggccgtacccttcggtgagagactaatctcccgtgcggccgtgccttaacacaatgctgacagatcgattaccgtactcatacagcacgcgcgtgccttgtgcccttggctcgctgtgcttgtgtttgtctgaacatgcaggagacggagaagatcgcgctggcagaggcgactggcctggaccagaagcagatcaacaactggttcatcaaccagcggaagcggcactggaagccgtcggaggacatgccattcgtcatgatggaaggcttccacccgcagaccgcggccgcgctgtacctggacggcggcgcgttcatggccgacggcatgacgacgtatcgcctcggttcatgaaccgccgtggacaatccaaaaccaccggacgaccgtgtcggagtgtttctgcgtaccaggaagat

SEQ ID NO: 6505 - DNA, 524 bp, Zea mays
tgatgggaaatatcttgtggcctttagccgaaaccatcaagatttgattgtataccgtccaatctggttgacatattcatgcaatgaagaatgtgatcctcatgagcttccgccaaaggcaaagaagtttgacagcttctttaagcagctttattcaattcctcttgcatctagcaatgagtatatttgcaaggactttttcctgtacatggaatgccatcgatttggtttatttgcaacatctactgcacaaagtaacgaatcaactgccactgagggtgcaatacatggggtgccattaattgagaaaataactttccatcttgtgaggtacaaatcttgtctcttgaggaatgcattttttgggggttctaagttacaatatattttgtatccgttgtttccatcgtttgggtggattaggacatttgtatttgtgttaccaggctagaagatggtgtgatacttgatgaaaaggctttctgcaatgattttatcaatctggcacatagtattggtgcagg

SEQ ID NO: 6506 - DNA, 355 bp, Zea mays
tttcggcgtcgccccagccatcaaggagcgaatccccaaggagcccacgagaccctccaccgttgtcgtggtaggtgctggccttgctgggctagctgcggcacggcagctggtggcgttcgggttcaaagtgatcgtcctggaaggtcgcaaaaggtgcggtgggcgtgtgtacacgaagaagatggaaggcggtgggcgcttggctgctgctgaccttggcggcagcgtgctcacagggacatttggaaacccgctaggaattgtggcgaagcaactcggcttgccaatgcacaaaattagagacaagtgtccactctacaggccggatggctcaccagttgatccagaggtg

SEQ ID NO: 6507 - DNA, 723 bp, Zea mays
aagatgatagtgacctacaactccaacaaactcgtgttcaatggccatgagatctacccatcagctgttgtgtctaaaccaagggtggaggttcaagggggcgatttgcggtctttcttcacattggttagcagtcagatgctccatcgttgacaaatgttctacaagtactactaccacttcttcctccctgatggccatggtcatcaaatttcaggttatgacagacccagatgttccaggaccaagtgatccatacctaagggagcaccttcattggtaatgttcagcatttcttaccttagtagggatgccaagtagcatatgatgatagcaccatatctttcatatacagaaaattccgtgatttctagcacttcagagtaatgtggctaaaaggcagcctttacatttgcaggatcgtgactgatatacctgggacaacagatgcctccttcggtaggttctgctgattcaggcttagcctattccatgttctagttcttctttgaattaataaccattcatcttccaaatttcagggcgacagatcataagctacgagagcccaagacctagcattggtatccacaggttcatttttgtgctcttcaagcagcagggtaggcaaaatgtaactgtgccatccttcagagatcatttcaacacccggcagttcgctgaggaaaatgaccttggcctcccagtagctgctgtctactt

SEQ ID NO: 6508 - DNA, 556 bp, Zea mays
caacgaacacaacattgcaaaccgcagagaaggcatgtagggttttttttaataacattgcaaactgtaaattaaactcttaacgttaacatgatatgcgcaagaaagacagtctcacagccatcatgtgtggttttctaaaacttaacgtgctgcctgttctgttcttgtggcttcagcagcgcaacctccagtctccaccggaggcgccaccggacctgaaccgctgtgtccctccttggccgcgtagcctgccggcaccgagcaatgacatggacgtggagacggagctgtacataggattacccggcagggagcgctcctccaaccgggactctgattgaaccacggattttcagttcgatcggctaaaaggaataagctccctgaaattaaagcatcgaagggcacacgtcaatggttttatttgcaacttttgtatgcaaacttgtacttgaaaagtaaaaaaaataaaaataaatctgtagtatgtggatgcaagaaacggctggttagctagctgcaagccttctggggcctgaaaatgaaatccacc

SEQ ID NO: 6509 - DNA, 696 bp, Zea mays
  misc_feature (328)..(328): n is a, c, g, or t
  misc_feature (330)..(330): n is a, c, g, or t
  misc_feature (335)..(335): n is a, c, g, or t
  misc_feature (337)..(337): n is a, c, g, or t
  misc_feature (352)..(353): n is a, c, g, or t
  misc_feature (355)..(355): n is a, c, g, or t
  misc_feature (412)..(413): n is a, c, g, or t
  misc_feature (449)..(449): n is a, c, g, or t
  misc_feature (459)..(459): n is a, c, g, or t
  misc_feature (473)..(473): n is a, c, g, or t
  misc_feature (485)..(485): n is a, c, g, or t
  misc_feature (494)..(494): n is a, c, g, or t
  misc_feature (498)..(498): n is a, c, g, or t
  misc_feature (502)..(502): n is a, c, g, or t
  misc_feature (512)..(512): n is a, c, g, or t
  misc_feature (517)..(517): n is a, c, g, or t
  misc_feature (521)..(521): n is a, c, g, or t
  misc_feature (538)..(538): n is a, c, g, or t
  misc_feature (541)..(541): n is a, c, g, or t
  misc_feature (549)..(549): n is a, c, g, or t
  misc_feature (556)..(556): n is a, c, g, or t
  misc_feature (565)..(565): n is a, c, g, or t
  misc_feature (570)..(570): n is a, c, g, or t
  misc_feature (573)..(573): n is a, c, g, or t
  misc_feature (575)..(575): n is a, c, g, or t
  misc_feature (635)..(638): n is a, c, g, or t
tgtcttctgcacatgccgtatcttgacgatgccccatacattcatgagaaattaatcagggaagttttatcacagtattgcgagtcatggagtagagatgatgctcaaaggcagtacattgtagaacttggtataccagaagaatggatgcatgaagctctggtgagtataaaatttctttagtaatatgctttgcaaatggtttataatgccagtgcatgaaaaaacatcacacatgaagcatgtgtagctaatgagctctatatacaggctctttatcacgaatactatggagataaacagggcgcactggagaatttgattcagngnggcancnggaagaaagctcatnntnttttcgtgacttctgttgctcattctatgtttctgtcatgtaagttttgcttacagnnccctaaacattttttcaaagaatttctttatttggnaaatatattnccctttttccccangggtgaaacatnttgcttttnctgngcanaaatatacanctgcncgtntttcctagaaacctcangangagtttgntcaaacnatttattcnttttnttntnttttttttgataaacatggcattcctggtatgaatatgcagtcacttcattcgttgttannnnggctcagctaaccatcaggaggtctggaggatcacaagtgcctggagaaccacaagta

SEQ ID NO: 6510 - DNA, 404 bp, Zea mays
taatgcattgtcataaattggaaattcgcagtgtgtcgcaacagagtagtcgtgttaagccattgttagtgtggtagttaaaatgaactgacaacttgaatttgatgatgtgtagtagctggggctgagtagaacattccaaatgcctactaatgatgtttttttaatgaatgaatctctttgcaggacaacagggtgggaagtggataattagcgctgtgtgtccggatttaattgcttaggatttcggcagagagaattatacatatgtaaattatcagattttgttcgtctatatagccttggtgtgcatgcaagtcatcaatcatgcagcttcctggatgcaataatggttatgtgaagctagttgtacagaaccttgtggtataggttgctaggtgtcc

SEQ ID NO: 6511 - DNA, 252 bp, Zea mays
atcaatttctttaacttagcgtactggttgtgggatttgatggtaacataaatagtatgagagttgcttgggaattagatgattctggagaatcagcttccaaatgttaatgacaacggaaaactcaatgtaggggcttcccctacagtatttctcaaaaaagaaaaaaaacggaaactcaatgcctctattgggacttggcagtaccaattaagtgatttccttttgttttttttatatctgtaggtttgc

SEQ ID NO: 6512 - DNA, 370 bp, Zea mays
ctggttaaggaaggagggaaaactcctacacagactgaatttccacttagcagccttgactctttcccatcatttccattcttcagatctaaatcagctcggatagacagttcaacgtcgcaatcatccagtcagagggaagataggttggtgctgaagaacaagtctcctaggtggcacgaacaactgcagtgttggtgcctgaatttccgtgggcgggtcactgttgcctcggttaaaaacttccagttggtggcttctgaggacaatggaccagagagccaagagagtgacaaggtgattctccaattcggaaagatcggaaaagacttgttcaccatggactacggttatccaatatcggcatttc

SEQ ID NO: 6513 - DNA, 701 bp, Zea mays
gagcgtgtacggaaggagctgaagaacgagcttaagcaggtaactctctttgaaaatgcttcattcatcatcgtttatggtgcattgttgactaacaaaacgtttcctacctctagggttacaaggaaaagcttgtcgatatcagggaagagatcatgcgcaagcgcagggctgggaaacttcctggagataccgcatctgtactgaaagcttggtggcaagctcattccaagtggccgtacccaactgtacgtgacaccacgtcaacttaattccctcgttagcttctgctatcaggttcggctcattgatgagcaactctttgcttactcgtccaggaagacgacaaggccaggctggtgcaggaaacggggttgcagctaaagcagatcaacaactggttcattaaccaacgcaaacggaactggcacagcaacccaacatcctcggctgaaaagaccaagaagaaaaggtatcacaatgaaaactgctttggtgttgcctaaggcgtaagcccagacaggcttgcctgcggcttgcaacatctttttttgtactactgttttcaacacgtggaattggaaacgttgcaggtgatgatggcccagagcaatcttgggaaaagctagagatgtccactatactttattatggcgaagtacattctccctcacttcgtaggcaagagggaaaggtatctt

SEQ ID NO: 6514 - DNA, 414 bp, Zea mays
gttcttcgatgaattaaaacttcaacatccgattgatttgtcatttgtgtgagctctcaaaggcttcactcttgtctgtgtaacattttcagtgatagatgacctgatataccatgcatcttatacctatatgacacacctagggcccggacggacgacctcgtctgggtgtagcccgtgcgaaatgggggaccgcatgggcgcatggcatattggcatgtgaaaggagagcattgctgccagcttaccgcgacggctgtttcgatattcgagttatttacaagtacctaatatatctactttcgtaatatctagatgacacatttgcaacatgcgtcaaaatttgctgaaacatttcgaatatgtatttgtaatataagtatagttattacaatagactccctcggttcgtta

SEQ ID NO: 6515 - DNA, 670 bp, Zea mays
gaacctagtgatgcaaataccaatagcgccaccctcctctcagatgagacagacgacaggcctaaagaaaacacaaatcaagaaacgggcacctcaaatcagcttgaatacgaggtaatgaacccaagactcatttagaagtttgttgcagcacttttttgttgttgctgttttagtatattttcatttctgttctttgatgttgccacacagatctgcccttttgtctctatgttgtatgttgatgacatgctaacaatatacttgtttaaacgcccttccatttcttggcgtgtttcagtctaatccttccgttgctgagcgcgaccagagagacaagatcggtgctccaggctctgccctagatgccagtcaatcatgtaagatatttcagcctgtaataactggtcttcctttttgttgttaaccacttcttgagttctatatctccatctgttttctgataattattttaattgccagcgactccgggaagaatgttttcacgtcctataaaaactaacctgaaggttgctgagtcgtctgcatttctagcatatgttaagtcaagcaccccagccaccagctcatttgatagcggactacaaagaggtgacagccggttagattctttggataaccatggtaattgctctagtgcaacagatag

SEQ ID NO: 6516 - DNA, 451 bp, Zea mays
cggatcaacccactcgttcgcctcaaagccaaaggtaaactaactaagcatatattatattcgtctactagctgcagtacgtctgtctgaatcttctgcatgcttgcaatgcaggtatcgagccggacttcgggctctacggcctcaaggcgatcaccaaggtcttcaagagcggcatcaacgcgacgccggtgatccagtgcagcaagggccccttcgacaagtacatgctgttccagctctacttctgcgcggcggggaacggcacgttcatcgactgccccgcgccgcagcagtacacctgctccaaggagatcctcttccaccccttcaagaagtggatgctcaagcagcagctcaaccaggacgacgaccctttccagctgcctggcgtcgccatggacaactgatacaccgtaccgtcgtctctgtttgcgtttctgtcaagtgt

SEQ ID NO: 6517 - DNA, 820 bp, Zea mays
  misc_feature (812)..(812): n is a, c, g, or t
ctcaaatgatgatgcaacacacaaatttgaggagaaaagtctagaacagctcaagcatgtagaccctttccttgacatggtaaagttttactttacaaaaacaatcatgctatgtaaaatgttgcatgagtaaaaaagttttcctttggtgcaaggacaaagatatcagtgcacaactactataattggtatcacagaaaaccaaacatggtgttacaaagcatgcaagatctgtaattcagcaatcattcaaaaggaaaatggttataaatgcacaaaggaaggatgtccatctacacaatttgaatggaagtaagtgtatactgctttgaataataattaccataatgcgcactgttagtaatattaatactataatctttagaacagacgtaccagttctataaatgattgtatattaaatagatccaattgaaatgagccttcactacaatatactcttacatctatatgtaaacatatgcttattgatcagaacaaatataatactctttttatttaactaactttcagttttatactctaattcagatacaagataccattcattgcaagtgatcacacctataatctagagtttatgttctttgagaaaaaatagatcaaatataatattctttttacttaactaactttccattttcatactctaattcaggtacaagataccattcattgcaagtgaccacacctataatctagagtttatgttctttgaaaaaaagggaatggagcttataggaaagagtgcatcgactcttcgaaaacaatatgaaccaaaggagatacanccggatat

SEQ ID NO: 6518 - DNA, 397 bp, Zea mays
gtcttggaattggaatgcctggcacaaacacgatgccagtgtttggactccctgggcaagcaatccatccctcagcgtctagcgtacagccattcccatcgttggcgggtcttcctgttaggccaaacctggcacctcaagtcccagccgtcatggctaacatggtgcaggagcaacagcaaggcgtagcgactcagcagcagcagagtctgaataatgaagctcaacagaaagcaaataccggagatccacaaatactacaaaaatagatgaagagatcttcgccagtaatcagtttctggatggtggtggcaacaggactaatactatagggagaaatgaggctgaaacattaaaaacggtcagcaagtgccagtgtgtaacctgactcgagcta

SEQ ID NO: 6519 - DNA, 365 bp, Zea mays
aacacttgtgtggaaacggttctgctaagaaggatgagtcctgtgactgcaactccagctttgagtgcaatatctgtcttgacccagctaaacagcctgtggttacaccctgcggtcacctcttctgttggccatgcttgtaccagtggcttcatgcacattcaccccactctgagtgccctgtatgcaagggtgaggtgctagaactgaatgtcactccgatatatggaagaggcggtgaagaagggaattccaccaaccctgacttcccacctaggccacgagcaaacagaagggagagcctgaggcaacagctgcaaatgacagacacaagaggaattgcaacagtggtgaggcagttgata

SEQ ID NO: 6520 - DNA, 400 bp, Zea mays
ccagttaacggatgaagtgctttgccaaagtatactgtcaaggttgtcaccaagagatatagcatctgtgagctccgtgtgcaggtgtttgtatcatttgacaagaaatgaagatctctggagaatggtttgccagaatgcttggggtagtgaaactactcgagctcttgagacggtgcccgctgcaagaaggttgggctggggacgtctggcaagagaactgaccaccctggaagctgttgcctggaggaaattgacagttgggggtgcagtggagccatctcgatgcaatttcagtgcctgtgccgtagggaaccgtgttgttctatttggtggggaaggtgttaacatgcagccgatgaatgacacgtttgtattggatttaaacgctagcagtcca

SEQ ID NO: 6521 - DNA, 395 bp, Zea mays
ttctgagtgcaggaggtccgatctggagccgtatcttggcctgcactacccagccaccgacatcccgcaggcgtccaggtttctgtttatgaagaacaaaatgcggatgatatgtgatttctctgccactccagtgctgatcattcaggatggcagccttgcacagcccctcagcctctgtggttctaccctcagggcttcccatggttgccatgcacagtacatggcaaacatgggttctgttgcatcgcttgtgatgtcagtcactataaacgacgatgaggaggaagatggggataccgacagtgaccaacaaccgaaaggcaggaagctgtgggggctggtcgtctgccatcatacaagcccgaggtttgtccctttcccgctaagttaaa

SEQ ID NO: 6522 - DNA, 839 bp, Zea mays
gggggggtactgactgcctcgaaggatcagattattaaggtctgttgcttgtgcttttgtactttagtctgtttttcttgtcttcaaagaactgatggcagtgtacacgctataactaaaattctagtgctgtctatggagatgggccaatccatccttgtgagcaaatgatggcagtaaattattaacttttggtacgtttgctaatgctatcactaattcgttttgcagctgtatgatattagatccatgaaagagctgcaatccttccgtgggcacaccaaggacgtcactggttagatagctgttccaatatcaagatttttataatttatataccccttcacatattttaagcttcaaaaattgacacaagttttggatgtactagttcatttgttcattgcatattttaagcttcaaaaattgacacaagttttgaatgtactagttcatttgttcattgtaaccatacattctatgattgttagaacagtggctaaaaaatttctagaaaggtatggtgcccacacttgtttgccaaggttgtactgaatatgtattcggttacttcatttttacagcattggcgtggcacccatttcatgaagaatattttgttagtgggagctttgatggagctatatttcattggttagtcgggtaaggtatccatagcataattgaaattactgatctttgtcacccttggaatttgctactttgtgctaagttattcaattcttttcaccctccaagatcgacgtacaactttttatgtcttttgttgtctgaaaataatgtctcaagtctcaacttgatgagcaagctgtttcatt

SEQ ID NO: 6523 - DNA, 445 bp, Zea mays
gggggatgttagcatgactgatatgtggaaaacaggacgtatccttgatgatcatgcattaagatggtttaaaatcatctgttctgttacataattgttgttacagcttgaatttcttaacatggaaaatagaagaagtgcagtgggaccagatggatttcctgtcagaagatgttgtcacccctcgagcccataatcagcagccggtcacagttgacgggccacatatggaggttccaagcatggacccataagacattaatggctcaacaaaactgacatctggagcggtgagttctcgtgtgacagcaaatgtttattgcaacagaagggccagacggtttcatgagcgtatgtcatctggagtgtagtcagggcagagcagtccacaacttcagattggtgcacgcccggcacctctgttgtgaagactgacgagctcaac

SEQ ID NO: 6524 - DNA, 372 bp, Zea mays
atacttgccccccaatgcaaggtgtaaagcccagtggaggacgaagagatcgacctcgctgtacgagtacgacgaagaacggaagggatgcttctcggtcagcggcggcggcgatctcgctgtacaaggcgattagtagacgtacaaaatgtaaacggaaatcgattgatgggcggaagacatgtacgtatcttgttttgatacccgcggccggggccctcctagtcctagaggcgtactgtatgattgatgatgcgggccgtctacaactactactggtgttgggctatatgtatatttatctataatgtaatcacctgtaactatagttggtcagattctaaagagcacggggcatgcaggtatggaaca

SEQ ID NO: 6525 - DNA, 416 bp, Zea mays
tcgtcgacgtctgatcgatgtcggtcgccatcgacgatctgcgtgctgcccgtacgtgtacatacgcgtgcagtgcatgcatgcatggtcgactcctactcggatccgatccgatcctgcttaactatatacatatatatatatacatgcatcttaatttgtgactttgtgaggagctcatcagtacgtgcatatcagctagctagctagtgtttgacaacagtcgtcgttacgttgtattgtgtcagtgaagttgctagctctagctagctacttgctgtacgtgtgtgagtgtgtgcagctgatctgaatcagtagcgtgtgcagcatgcatatcctagcagtgtgtgcgtccagtccaggtgtgtacgtacgtctcggagtgacgatcgatgtgtgccctagttgctcaagat

SEQ ID NO: 6526 - DNA, 603 bp, Zea mays
  misc_feature (92)..(92): n is a, c, g, or t
acttgggaaaagcaactggaacctcaaggtgaatattctttctttgatctgccatgcatgtgtggttgtgtgttgtatttactacatggtcnttattgatgtccttttccatgtctgcagaatttttcacggctccccggttctgttctaagacttcttcagacaccaattccagtaagtaatataattctattagttctgtacattctttaccacatcacatgtcatgattgctaacaattctggtctgaaaacagggagtgacagatccaatgctttatattgggatgctcttcagcatgtttgcgtggcatgtggaagatcattatttgtacaggtaaaaaactcgagtcttatgataatgattagctacttatcttttaaaggctgcgctgctgcggatgctgatttttgatcatttgaccagcatcaattaccatcactgtggggcatctaagacatggtatgggataccaggcgatgcggctcctgggtttgaaagggttgcaagccaatacgtatataacaaggacattttgattggtgatggagaggatgcagcgtttgatgttctactgggcaagacgacaatgttccctccaa

SEQ ID NO: 6527 - DNA, 393 bp, Zea mays
tgccttaattcactctctgcactgatgagatgcaagcgggatgctgagatttctaccagggcatcatccctctaccatttgattgacttgcatggtaaaacagtgtcctccattgtgaacaaagctgagcctcttgaagctcacctgacccttacaccagtaaagaaggttaatcaacatcgctgtgaggaaaacaacaccaactcatcggatagtgccaagttggaaaacaagaatggttcaacacataagaaaaacggtttctcaaaaccacacttgaaatgtgcagaagaggttctgaacggcaatgttgcaagtacatctgggaaatccattgcaagcttacaggtggaagcatctgatttggcaaacttccttaccatggatcggaat

SEQ ID NO: 6528 - DNA, 414 bp, Zea mays
ttttctgctggagaattatatgccaggcgctcaagcctttgagagctcttcgtcaacaagaaactctggggtcaccctttcagaggtttcagctaacccaggtttgccatatggcggcggaggcggtggcggcacgagctctgggctgtcagccatctgccctcctgaaatccagtgcccagttgtgatggacaacatgtcgtctaaccaagtggccagcatgagtgctgtgcctcctgtttcgaaggctacaattgacatgggtattcctgaattctcagctctggcagacttggtgaatgaaggctccgtcgatatccctggaggggcctttgagatgcctggtcctgagtttcctctgccagaaggcgatgacagtgtccccatcgagaccgatgagaccatgtacaacaa

SEQ ID NO: 6529 - DNA, 440 bp, Zea mays
gatgagcgaaatattctgaaaagatcagatcagtcagccttcaccaggtgcaaaacataatatcagtgtcattactaggttattaacataacagtaagttgcatgctaacccattatgatttctgcaaggtaccatacatctgtggcttccaatcaaggtggagcaagatatggggaaagctcttcaccacaagataacagttctgaggccatgaaaacggactctacatgcaagatgaagtcaaattcagatgctgctccaataaagcagggctccaatggcagtagcaataacgatgtgggatccagtacaaagaatgttgctgcaaggccttcgggtgacagggagagagtagcgtcaccattagccatcaaatctacccagcatgcctcagcatttcatactatacagaatcaaacgtcaccagctaatctgattg

SEQ ID NO: 6530 - DNA, 1029 bp, Zea mays
ggagaaagctttgagaaataggtgctttggtggtagatttgctgcaactacacaatgtattcttacctcagatgcttgtcctgaaactcttgtaagtatccacctcaattattactcttacatgttggtttactttacgtttgtcttttcaagggaaatttactgtattttttgtgttttgtgggagttctatacttctgttggactggttattgtaaagatttgttcaaatagggtcatcttataattgtttgaaatctgggaactgtggtttcactgcgttcaggaaaaagtgaattcttggttactgcatgaataacttatggaaatagaccttagagttgctgcatgattatcacaaatcattgctacgatatcttataatagttctttcgacctcgcattacatatataactgcaactcgtagttgcgttaaaaaaaatgcaactcttagaacgttcaccagtgtaatctttcctgaattgttatttaatggcatgtatgcactacttgtatacttatctaggattaagtaatctaactctaggccccatatttgcagcattctcaaacacagtcctctaggaaaaattatgctgatgcaaaccgtgtatctgctatcattttgggcggaggcactggatctcagctctttcctctgacaagcacaagagctacgcctgctgtaagggataacactgaacatccaacgttgattactctattatagtattatacagactgtacttttcgaatttatcttagttttctacaatatttagtggattcttctcattttcaagatacacaattgaaccataatcgaagtggtatgtaagacagtgagttaaaagattatattttttgggagacttccagtcaaattttcttagaagtttttttggtccagatgttcataaagtcgccgctttcatactttttttaattttttaattggtgcactattaggtacctgttggaggatgttacaggcttattgatatccctatgagtaactgcttcaacag

SEQ ID NO: 6531 - DNA, 400 bp, Zea mays
gttcttatagagtcattgatgaggaggcacttaagcatgccatgtcagtattcggtgtcgttacgaagataaaagttttccagacaaggcagtatgcttttgttgagtttgcaaatgttgcggaagcttgtaatgctaagatgaatctagatggtcatcttttcaatgatcccaggattcagattcttttctcaaacagtgggcttgcaccaaacaaattggacaacccaacatcggttgctggatttcctagttcagaaatctattccagtgatggtcgtctaggccctggtattggcagtggaactttgcaagggtatgatccaccaagaggaggaagaacaagatattacgattatgcgggtatgcctactccaggtggtatcctttcacaacctga

SEQ ID NO: 6532 - DNA, 919 bp, Zea mays
  misc_feature (856)..(856): n is a, c, g, or t
gacggaaatgacgagctattgctaacgaggatttcttcgttgccatgcgtacaaagaacccttaaaccctaatcctcccccgctacacgttcgcttgatctttacggccgccgctactcgttcgccatggctgcctgctcctccaggctcctaaacctcactctgagctcctctttcctccgctcctgccgcctcgcgtccagctccctacttcccaccgcctcccgctgccacccggggtcgctccactccctccgcttctgctctgctgtccccgagtttgtcgatgtcgccgccgaccctgccgaggcggctgtatcctccggacacccgtggccggagtggggcaacttccttgataagctgcgggccaaggggtacttcgagcaaggtttgccctccagcgtgagttctggcgagggagccgccggagatggggatccagcaactgcatctgagaacgcagcaacggctgcttccggtaatacggtggtggatgcggaggatagcgcggtgacctcggaagatatctatcattttctcaaggacgagaacagggtgaagaatgcgtgcctcaaatttgggcgagaccgcttcgatctcctcagcttgcttcccaagcaggatattcaagctattgttatgtctggctgtcctaataacaatcggaagcccgtctattctgcaaaaaggttgagagagtacgtgcaggtcaaagaagaagatgcatgcagcatttgcaaatttaaggcatcttgtgatagagcttatgtcactccaaagggtgaggttgaagttaggactgttgatgttgttcgtatactgttaagttatgcaatggataaaaaccattcangagataactctgttatcgaagaagtgtgcaagaatctgcaaaaagcttctctcaaagcttact

SEQ ID NO: 6533 - DNA, 385 bp, Zea mays
  misc_feature (69)..(69): n is a, c, g, or t
  misc_feature (141)..(141): n is a, c, g, or t
  misc_feature (331)..(331): n is a, c, g, or t
tttgcccttcggtctgtatggctcgatccccttatgattgggcatggcggccgggcgtcgtctggcttnttctggctcaacgcagcggagatgcagattgacgtgcttgcaccaggttgggatggggtcactgaccatganaacgggcggatcgacacactgtggatggctgaggctggtgtcatcgatgcattcttctttgttggttctgagcctaaggatgtgatcaagcagtacataagtgtcacaggcacaccttcaatgccacaacagtttgctactgcgtatcaccaatgccggtggaactaccgggatgaggcagatgttgacngtgtagatgctggttttgatgagcatgatattccatatgatgtgctctgggctc

SEQ ID NO: 6534 - DNA, 840 bp, Zea mays
aggaatgtggcaaactacatgggtcaaatggccatggctatgggaaaacttggaacgcttgagaatttccttcgtcaggtattaaccctcttttccaaatgcatctttgtgacatagataaagggttctgtgaatgattgtactccctcccaaaaagaatgctcatcttgcatttcagggatagcttttttaagtttggccagacagaaaaaagtactaaactactaatatttatttatgaatgcgtagtaagtatcgttaagttaatcatgaaatatatattgataataaactcatttgtaccttcaattgttggtactattctttataaacccaatagcacttaaaaagatttgattatttaatatgagggcattagacttgaatatatatagcgatatacatgatagagaccgtgtatagaacaataactttatatatgagatgaaataaaacaccgacatatgcagagacatctagcaatgacacttatgtatgaaactgaactgaatacgacaaggacaacctgcggtgcctaaatcctgctacttctctttgttgtatgtatcaaggctgacaacctgcggctgcagactctacaacagatgcaaaggatcctgaccactagacagtcagctcgggcgctacttgtgataagtgattactcttcacgtctccgtgccctaagctctctctggcttgctcggcccaaggaatagcaagaacatgctatttgactgcaatacttttcacaatttggttttcaatggtcaggagatttgacaaggctgcgacagacttgattcggacatatctgcacatactatgacccaaatgaag

SEQ ID NO: 6535 - DNA, 1444 bp, Zea mays
atgattacttattcctctgcccatttaactgttacaccgcagtttagtcgagcaaatttcgaactacaccataattggaactgtaaaagcaaatcctatgatggcaccataggaaaaactgctcagttttcaagcgctataaggattatacatagccaataagtttcggcctaggcaaaaaaattggcaaaaacgtgccctagtagacaacagcatagcctgattgtctaatcatccagctcaatgatcttcaccacagaggaatcacccactttctggcaaacgacgacgcggtcgtgggacttgatcacgcccgaggctttgccatggtcaagagcaaccttcaacacagactcatttgtagcactggtagattcagcctgaaagatacaatggagattgattaatgccaagtcaccagatagccatcgttcgttcagtcaggtatcaatcaatcagtttgccccaccgaatttgaaatatatgaaaactatttaagaacgataatacgtgacaagttagaggtaacaacaattgagtttcaatcttagcatacaccagcttgcttgggactaaaggctcgataaaccatacttatcataccatgcaaactgtttgaaactaaactactgaactgcattctagtgttcttgccttgaaacatggtgtgaaacccaatggaagcaagaaccattaaacatgatatagttatgttaataaaggttgatatatacatgtacgaaccctagtttcatactactaactaaaaatcgtcaaactgtcttgagacatcttattaccatagaagagttgaaacaacgctagacttcaaagaatacaatgatgctaatcccatatattggctacacgtaggaaatcagaagtttgtgttgcaattatagtatatacttaaatccctctaataaatgagatgtttaacttactgggtgtcgtggatcagcaagcatagggaagaggcctctaactatgagtgattgtcttgcctgcaagaaatcatacaaaaaaatgagtcatatagtaccaaatattagcacaatccactgacaaacagaaaaggaagttgaatggttatatgtttaatgtcaataagctaaactttgcacaggcagtaattcagaaataaatggtcaacatgctaataacaatatgagaacccaacattgcatagatatgttgtgaagatcacaaacacagttcaaaaggaaaaaaagttgttcacgcacctcaaaaacacctgtgaaactccacctcagttggtttgtctttagacgaggaatgacaacagacaaaacaggcatgctgggcctgtacttagcaatgagcctgcaaatcatttagatatacatgagactaattttcattgaacttaaactacagccctgtataagcaatattcatttgtatatatatatacctgcagctc

SEQ ID NO: 6536 - DNA, 732 bp, Zea mays
atcgcagaagtagtaaaggagaagataaagctgccaacatatttatctagtgaagttcactcaatgttgaaaggagtaagttgctgctatgtctaccttgctcctatgcattttgttcaaccagctttgtgttattgttaaaacctactgtttacggccatcactctaccattcgatctcataatgtttccattttttgtggataatcatcctgccatgatcatgtcatatttctcaacactgttatttatttcagttattgcacaaagaagctggcagacggctgggaagcggaccaggcggcagtgacgaaatcaagaaccacaagtggttcaagtctgtaaactggaagaggctggaggcccggcagatcgagccaagcttccggccgaatgttgctggcaagacctgcattgcgaactttgacgagtgctggacgaacatgcccgtgcttgattctccggtggccagccctgttgcggccaacagcaactttgtggggttcagttatgtgaggcccgcaccgttcctccagaagccgagtccccttggctaaagaactacttccgtgatctgatatctaccccagagttcaaataactatctttgagtccgaatcctatgtatttcttcaagacattagtgatgggaatctaaccttattgttgtgttgtgggtaggccagccaagcgcctattgcttgagaacaacagctggcaagtgacatggcaa

SEQ ID NO: 6537 - DNA, 1269 bp, Zea mays
  misc_feature (1243)..(1243): n is a, c, g, or t
cataaccgtgatcggcactttcgaacaaaaatggatggttgcagcatttcttcaattcaacaacaatgttcaaaagtgatacctgcatatgccatgatcaagtcagtttggtagccaatggccaagtgttgccttgtgcccatgctccagtttgctaggtaatgcacagtgaggtgaggaactgcttgcgctagcaatagcaggtgagaaagaatagtaacattgttccaagcaagataatcctggcaaacaccacagcttttagcaagaaaaacggtcctagactaccagcaacagtatatattcatgtatgaacataagggtcaacttgctacatactgagacaaccaaattacattcaattccaagataaaaaagagcggtaggccggtagctaacaaaaaaaaccaaatgcacccattgaaataactaaaactaaagcctagaatcctacaaaatactcttgaagatgtcaggctgtggagtttagttggggcaacagtccttagaaggttatgccctagtttagggatgttggtctgtatattcctctacccccctccccttcttggctgcctgttcaggcagtttgtgatttggtcgtatacagaccaccccccttttcttcttaatataatgatgcgcagttctcctacgtgtttgagaaaaataacataagccgcagaaaattaaaaaacataagaacttgattaaaagaacaggatgtaacaaaaacctgattcccacggactcctttatttagattctggaaattccgctctaaaatccacttgtagtatctagtaaaaaacaaaaaagtttagcctcaatgtataaacagagcaagttatagctccaggtccatggtccatgcaggatttggagcttgtaggaaaaaaacgaaaggtctaagaatatgggtttgatccaaactaataggaaaacttctttaaaaaaagaggttcaagaaaatcagaatgaagtactcactgtttctgaaggggtgacatctcgacacgtagaatccgttcaattttaggaggtaaagacttctcgacatcttttataacccgccttagaatatgaggcctcaattccttatgcagattcgcaagctataagaaaaccggcaaaagacgttatggttatgagtttcaatcaacggaaaaccaacatattatatgatgttcagtaaatataaagctttcatttggaacactacctcggtttcattgaaggaacntcaaattttgtatctttcaacaaaac

SEQ ID NO: 6538 - DNA, 528 bp, Zea mays
aagtttcaccagacgctgcctgaatcatgttctagttttctgttcttgcatacaaaagattgtagtgttttcgtacatatttatccataataccaaatcagatacatatacatgcttaacgcttccttctaatatccaagtatttgctgccccctctttgattttgtatgatttattatggactattggtataatgcagctggagttccatcagagaatattctttatcttggcggacctaatattgcttctgaaatttacaacaaagaatatgcaaatgcacgtatttgtggagctgacaaatggagaaagccccttgcaaagtttttgaggcagcctcattttattgtgtgggataacagtgatctcatcactcatgaagtcatgggtggcttaaaaaatgtctatgctattggtgctggtaatttctatttgtctttttcactgtttcctgttttcttgattacaatggagagctacatatatcattatattaagaataaaaagatgggctagaaacccttgcac

SEQ ID NO: 6539 - DNA, 1033 bp, Zea mays
taggtttgtcttcctttatttgtgtctctatagactgttctctgtcctgtcatgaaatttgtactgatctcatgtccatctgcagcactgggagccatattttcttaacagacaccgtgtgcacgttgcaggtctgctgcattctgaatccttaacactttgtcccgcttccatctgctcaacacacggagctgaaacgcaggtcataaaccaagacgagacgccaaggctgtacagcctggtgtttggagaaggagttgtcaacgacgcaacggcggtcgttcttttcaatgccatcaaggatctcgatatcagtcggctcaagggtggggttgtgctaaaagtgatatttgacttcctctatctctttgcaaccagcactgtcctcggaatctcagtaagaactgtttttttcttccatatatatgcattagcgccatctctttgtacacccttaactctttaccgcaaatttgtcagatcggtctagtaactgcatatgttctcaaagctctgtattttggtaggtgagtaatcgttgttaccgatcggtttggtttgtgttcatctgctactcttttatctttgaaatctcttccccatattttgttcaggcattcgaccgatagagaggttgccttgatggctctcatggcctatctatcatatatgctggcagaggtaagaataagattaccaaattttatctactagtacttacattatgcacttccacaattcatcccaagatgctgcatgttctgcagttgctagagctgagtggaattttgaccgtgttcttttgcggcattgtcatgtcccattatgcatggcacaacgtgacagagagctcaaggattacaacaaagtgagctcaataatcaatgttcaaacatttcttaagaatcgaatgctgtgttcgattggtctattcggatccattctcagcaatgtttatgctgttgcgaagtcatccttattcttaggatggtctgcaggcataatttcaacatttctttcattccgagacaaa

SEQ ID NO: 6540 - DNA, 579 bp, Zea mays
atagggattccaatggcgaaaagagcacagacgaatcctgatatcgcaatgcagtaagggagtttcagaactccatcatcactgaacagtccatacgtggcctgcaagtggaaataacagtatatgatattatatggcaaagagagagagagagaggaatgaaaataaatggtatgagtcgtcttcatacggtacggtacccctccctaccttgagagcttgtccagctaagatgataaagccagtgttgatcatgaaaaggttaatgtactgcagagcccatgtaagcccgtaaattttcggtcctgaagtaaaatgaaatcaaataaaaagaagaagaagaagaaactagtgagactattctatataatataggtagggagtgcaagtgcagagcttattactgactgaccatatatgtgtccagcaaggtctctgtatctgatatggcgtttgccaccgacttcatgaagccgtgcaagaagagcattagcgtacatggatatggcggcagctaggaggaggccgcatgtgccgccgatccagcctagagggaccatgattgatccagagtatcct

SEQ ID NO: 6541 - DNA, 845 bp, Zea mays
  misc_feature (318)..(318): n is a, c, g, or t
tacttctatacgggtccaatattggtgtgttgattcttgaaaaatagatatgtttatctgcgtatgcatacatgctcaattctttgtgattgataaacgttaaaactgtttagacactagctgaaagttttatatgccaaataagttgttgtactgttacttttgaggactcaataaattatttaatttaatgagctgactctttggaaaatttgttaaattttagacttcaagaaggagcttaggaccctcaacagagagcttcaattgcatattttggagctggcagatatattagttgagagaccatctcaatangctcgtagggtagaagatattacgctcatattcaagaacttacatcatcttctcaattccttacgacctcatcaggtgtgaaccttagattttgtcacgcgcgtatatttctgctattcttcaaagccacgttgattaatatctttttagtagtactaacattctttagtatcttttaggcaagggccacattgattcacatgcttgagagccaaattcggcaccgcaaggaagcaattgaagatataaagcagtgagtctactttctcatatatagtagtgttgaaatcacatttcatgtattcaattttagtctgtgtctataacctttggactctagagtctccagtcacaattccagtttcctatttacttgtatccaccttccatcaactagcactacatcgtctgtaaaaaaacatacactaggggatatatcattgtgatctcatccatcaccaaggcaaaaaggtaagagtttaaagctgatctttgatgttctattttaatcgagaagtcacccttgc

SEQ ID NO: 6542 - DNA, 528 bp, Zea mays
gactccacaggatcaaatggactcccagtcgcaaacactgcttgtccctgtgaattcagatcgttagtgcagttgcagaaccatggttaataaaaagttgacgtgactgcggactgagaccattaccttgctccatgtgtaagcttgctcagctgtgcattcagattgtgatgttgggttcgatagggcaagaatgattggtctctgcgtttaaaaaaaaatactgagcttataaccttgttgcctcaatagactcggaactaacgagttcagttaatggaagttacctcgttaaatgaggagattgcttcaacaacgtcttttgtgaaagtttgccccttcccggatgtgccaatcaacactgttggtttgatagcctggaatgccatttgagtcaggacagattcaggtggccatgatacattatagaatccatattttttcttgaggacaaactcatacattaacagcatctaagaggttgctgagtggtttatgctcatgagcccatggtttcttgaagtgttg

SEQ ID NO: 6543 - DNA, 725 bp, Zea mays
aacagaaccatgtcaggcagtttctagtgggagttgtcggacacatgaggatacggacataataagcgggatattttgagtagaatttagtacgtcagttccccggaaccttacccaggtcagcagtgagaagggcctcactttcgtagttgggacccgccaacactgttcccaatggtgagatgatgacactccctccagaacaaacaacggattccggggatggctcttcctctaggccacaaaatgtgtactcgggagggggagggtagttctttctacgacagaactggcacgctgacagcacaaagcatcccccttcaagggcgatatgtgtcatagaagacagccaagttggcatgcaatcaaccgtgggagcacaatatatctcaatacctgcattaacattaacataggaggattcagcatgaaagataaactcagtacatgagacattgtgcaatttagcattacaccatgagcttgttggaattcacctcattccatatgtgttgatgtgtatagggatgtgaattaattcgagttccactccaatccacactaacacatgtggattgaggtagatacaagagtatccaaacaaggccttattggttccaaagtatatcccaacactcctaatttaaaaatacaaatggccaggattagggataatatctttggcatacatggccgtcctgagaaagtgcaatctggtttcccaa

SEQ ID NO: 6544 - DNA, 801 bp, Zea mays
catgcctgcagcggcgagggtcgtgcccatggcatcggcactggcgggacgcggaaggctggtggcgcgtgcagcagttacagttgcgtgacattgctcttctgatttttgtcagtcctttttttggtcgcaacacacattggctgtcctgaattattttctccttgtgtgttctcttgcgcaggcaaaggcggatgtgccatcgagcacgtccgacgggtaagaacgttttactccctgtctatggcatccatgtgacctgagcccgggacatacgcctgagatgctccacttttcatatctgagattttcatatgtttgctgattttttgtcttcaatcactagtgcacacacatgccccaaccacaaaaggaaaatatgagtggactaagcagcaaagtgtggttttgagcatggatttctaattcggctacaataataaatgaatactcactggttgtagatatctctaggttatgtaactatatgttgtaagattttattatggtacatgaggccgtcaccattgaattgattgcaagatgaaatttggcaccgaacttgctgttttgaatgggttaccaacctgaagtaattacagtagtctggaaaatgagtatttcatccttgtgcctttgcttgcttaaatgaatctagttggcaaaataaatctggagacataatattcagttttattgtagttggtacttggcagcgctggatcgggcaccagttctcatcatttattgtccaagaagtgaactcgttgataaaaataacagatcttaagagatttatat

SEQ ID NO: 6545 - DNA, 1459 bp, Zea mays
agtggttagcagcccaaaagcaactgccagcttctcactatgttcagccagtgcacgttccttagattgctcatcaatgtcttgcaacactaaacctgtcattggcttatatccagcttgccttaagcgatccatcatctctcccaacattttgtagatctccttggaccttggatgcgatctatcaccagaaataaactcgtgaattgtattctgccattcaatcgagcttcttccaggaattctctggattctctccctcctaagcgtcctcctcatctctgcaacaccttcccaggaattcgcttgtgcatatatgtttgacagtaagacatagtgcccatcggcatgaggatccaatactcgcagtttcgccatagcttcctctgcaacttctacattcttgtagatgcgacaagcccctagaagtgccctccagatgactgcatctggctcgaatggcatgtccctgataagctgctttgcctcctcaatatgacctgatcgccccaaaagatcaaccatgcatccatagtgctgaaccttaggggttacaccatgcactacactcattgagctgaaatatttcttgccatcgctcacaagaccaagatgagtacatgatataagaaccccaatgaaggtaacctcatttggttgcagtccttctgatagcatccttgagaacaaggagagagcatcatggccgagcccatgattggccaacccgatgatcatcgagctccaagtcagcacatccttcactggcatagagtggaacactcttactgaattctcaatgtcaccgcacttggcatacatgtcgatcagagcggtcccaagcttgacatccaattcaaccccattgctctccacaaactgatgcacttcagcaccaacagcaagcgcccccatatcactgcacgccgagagcacgctcaccatggtggtgcagtccgggttgacacaggccgcgcgcatctcccgccacagctccagcgcatccttggacctccgccccttggtgtacgccgacatcatggagctccacgagaaggcatccctgtcgtccatgccgttgaacacctctctcgccaggtcgacctccccattcaccgcatacccatggatcatcgtgttccaagagaccatgtccctctcgcgcattccatcgaacactctcctcgcctccgcaacctcgccacgcgtaacgtatgccgcgagcatgacgttgcagaggaacacgtccctgcgcggcgcctcgtcgaaagcggcgcgcgcgaggtccgcgcgccccgccttggcgtaagcctcgacgagcgcggtgcgcacgaagaggtcggctgcggcgaagccggacttgagcgcgcgcgcgtggagggacgcagcgccgaggccgaggtcacgcatagccggaacggaggccgagagcgcggcggatgcctgcaggcatgcaaga

SEQ ID NO: 6546 - DNA, 781 bp, Zea mays
  misc_feature (681)..(681): n is a, c, g, or t
gtatcactacgcaaccagaagcaggatgcgctgtgcacgaactacacttcatggaccaatcttacttacaaagttacaagtcgatgaaaaggaccacctgggagaaaagaggttatagcttttgaatcacatcaagttgtcgtcaaagaaatccgataaaaaaaacatggtcaccataacggtaagtggtcaatagttgcaactaactcatgtttgaagcaactgacctagcctttctactcctaaaaacatatatctagcatagaattttctcaacgacagcctgtagactgcctagaacaaagagcatcataagaaaacatgaagcttcaggcatagcaaatacttatcatacaataatcagcagagattaatgcaacatacacattcccgaagctgttcttcgcatatgaaccaccatggtgaccaacatacatgaagagggaaccagaatgcttgagtctaacatgagggaagtgatcatcataatcactgattacctcacacaaataaacacccattttttattttaaagaaaaaccaatatgtgatacataccccaaagtttgcaagcacatgggaatgggacaccatctaaatcattctggtccttgtctgtcatcactaaaatcaagggtaaagcttaattaaactttttttattccacttactaaactgcantaacagaaagccatagaagctagatcaatctaagaccccaagggatttactgcacagtgggttcattaaacatttcttcattagcagaagtattatgacc

SEQ ID NO: 6547 - DNA, 749 bp, Zea mays
atagggtaacagaagtcactgagctggaagaatcgcctgggctctcagcctcagccttggatgaggaacccaacgcttgtgttcaagcagtgcttctcagggagccaaactcactaggacacaatcaaagaactgtagttcctagatcacagcatgcatctaatgtactgggtggaaatgagttggtgattgttggacctcgatatgctggttctgtgccacccattgcaacaagaggtctggaaaacagcaaggagagcggtggaaggggcttcaaacccaaaccttgtaacaacattttccaaaatggctcttcaaagcctgaaagggaaccgggcaattcgtcaaacaaaagaacagctggtaaaacggcggaggaccttggtcacaaggatagttcatctgaagtgtcctacgagtactgtgtaagggtggtcaggtggctggagtgcgagggctacatcgagacaaacttcagggtgaagtttctcacatggtttagcctgcgtgccaccccgcaggagagaaagatagtcggtgtctatgtggatacccttattgaggaccctgtcagcctttctggccagctcgttgacagcttctcggaggcggtatatagcaaaaagcggacgcccttctggttttctgcatggacctgtggcattgaaacaccacaagcacctaccgtttgctttgtatggagcacacattcggccccatctttttgtgcagaacgttgcattgattct

SEQ ID NO: 6548 - DNA, 740 bp, Zea mays
tacccaatgctttcgtatattatcctctcttctcattatttcatatgcacttgcaaaagtggcaaacaatcataatatcatcgctcattaaaaaaacagaaaaactattgcttgtaccatcacatggaaacaatttcaaccaaacatatatcgaggcgttaacagacaaactgattcaaaagaactcaggttggctagtgttctcattgtctcatatacactacaaaattaatagaaatatcaatcaatcatagtgccatcagcttgccaaatcgctgagggtctacagtcataggacagacaatttaaattaggtttctattgaggtataaaattcatcaactaattcagagggagctcatgcacttggagattgaagaacacaccaaagttgccttacaattaggctggtccaaacacagaatttaaatatttcataatcaagtctatccaaccgaagggcaggtctggtgcaggggtgagagttgtctcactgagtcaccaggtcgcgggtttgcagcagcctctccgtatttacagagggaaggcttgcctcggtttatcccttccccaaaccccactcatgtgggaacctccaacacaaggtttgccctttttaatcaagtctattctctattgctccaaatgccaagctttaggtacaaatgtaacacacatgagagggtccaataaaccataatttctgtacaatgtacatagcattaagtttgcacaaataa

SEQ ID NO: 6549 - DNA, 759 bp, Zea mays
aacacgtaacttgcgaataacgaacgagttttgccacagcaggacgatccttgtaccgtcgtccgcaagggttgtaatttctcacggaccgttacgacatgattgtatgtcaggttttgacagtttgagccaatgcaattcttctaatgaaaaagacaagtgcatgtgagtggttagcatctgcctatcgcctatcgggtatcatgtggagtcgtctggtataccgtcctacacggctacacctgagaacgaagcaaccttacccccaacaatcaccttgtagcgatccgaagttgttcatctttgagtttcagttctctaactccatcgtagctaagcgtttcagcaatgagtcaagagagagatttaactatttgtcaccgttaggaaggccacatcttcgtttccttgttttacctggcaactgtacgattttttatcggaaacgctaactggtctattttattgatgtaccatgttaaattagcatgtcacggtggatcttagtcttttttccggagagacacctggaaagtcatttttaccttcgcattttggactatttagtgcgttatgtgcaatttgtttagaattctatcatttagattgcgatatattaatatttaatgcaatactagtagtgtggatttttgggcacttatttgaagtaggatgagctgtggcacagggatacgaaaattaatgagcctcacactatgacacgtagcattaagatacgaaaataaacaacttgatttt

SEQ ID NO: 6550 - DNA, 710 bp, Zea mays
gctcttgctcctcctctgaccaccctcccggcctcccctcgctcaccatgaagatgaaatgaagctcttgtactgtaaggttcactcactgacggtatagtccccaactccccatgcgtagcagcggtagtaaaaccatccatcatgcccagtggggacggaaacatgtacagaatacagatacagactggatccgtttacgtatagattacgacgaccaaaacaggctgttcatcgtttgttccatgaacattgtttctctcacttctgtaccgtatgtgtgtactatggattcatagatctttcatgatgatgatgaggaggaggaggggacgacaataggagccggcggcacggagtcctccagcggccagcactcccagtcgccgctcttgttctgcgacagcgagaagtgcttgggcgtccacacctcccctctgtcgttcctctccttggcgaacctcctcgccgtgtcctccacccgccgcttcgcctgctgggctgtctcccagtccttcttcaggatcgcgttgctcaccttgccccagaccacggtcgactccgaggccgacacgccctgtgaattgtgatgtgacacgatccatcatttgatccatgacatgacatgcatgttcaccatcaaccaccacaatcagcattagatccatgctaccttttcgtcttgcaccacgggcgtggcgaggtcaccg

SEQ ID NO: 6551 - DNA, 534 bp, Zea mays
  misc_feature (12)..(12): n is a, c, g, or t
  misc_feature (21)..(21): n is a, c, g, or t
  misc_feature (94)..(94): n is a, c, g, or t
  misc_feature (211)..(211): n is a, c, g, or t
  misc_feature (217)..(217): n is a, c, g, or t
caatttataacnaggaatctnttcttctgtttgctctatagccaatgcttgtgttactgctctaaatggtttgctgctgtaagattgggtactnacaacaagatccattttttggatgtgcagagccaccttatggccgagtctatttctgagctacagaagaaggtaactaaagctgaaaaaactttcaaggcagttgcactcaggcttncaaaanaaaacagcacttgagtttgagtggccatttacctgctgatgatttgtggttcagaatgctctgcatctgaacagccatcaacagtagattgatcattgcagaaatgactgttggtactgctgtggtgtgcaggagaggtcactgcaggaggagaacaaggctctgcagaaggaagtaagctgccagagactgactgcaccctaaaccattgcattggcaacagaagggtttgatgtgtgtctcctctttttgtgtagcttgcggagaggcagaaggccgtcgcgagccggcagcagcaggtgcagtgggaccagcag

SEQ ID NO: 6552 - DNA, 326 bp, Zea mays
tcacagatgaaccgtgtgctataattgtgagcagtaacatttctacttgctcaaattagtcagtacatgcgtatcaactactatacatcgatgtggttcctacaagctgggctctccattgctttgtgattgctcgctctgacacaaaacaccgaaaagcatacgcaccgcaagccttgtgacatctcaagcgacaaacagctcggcctggccgtcaatgaacaagctcatgaactcctccccgtccacggtctccttctcgatcaggagctgggcgagcttgtggaggatgtcgatgtgcgtggtgattatctgcctgcttctag

SEQ ID NO: 6553 - DNA, 25 bp, Zea mays
cgtcgcaagagtcaaggatattaca

SEQ ID NO: 6554 - DNA, 20 bp, Zea mays
aaaaggtgtcaatatcgtct

SEQ ID NO: 6555 - DNA, 18 bp, Zea mays
aaggtgtcaatgtcgtct

SEQ ID NO: 6556 - DNA, 19 bp, Zea mays
cgagcagtggacgacaaca

SEQ ID NO: 6557 - DNA, 21 bp, Zea mays
cggagtcgtcgttggcaaata

SEQ ID NO: 6558 - DNA, 19 bp, Zea mays
aaatcatcagatcgttttt

SEQ ID NO: 6559 - DNA, 15 bp, Zea mays
catcagctcgttttt

SEQ ID NO: 6560 - DNA, 24 bp, Zea mays
actaggcgtccagttcagattttg

SEQ ID NO: 6561 - DNA, 29 bp, Zea mays
tggctttatttttcgatactgaagatcct

SEQ ID NO: 6562 - DNA, 20 bp, Zea mays
caatgttcttcaatccatac

SEQ ID NO: 6563 - DNA, 20 bp, Zea mays
caatgttcttcagtccatac

SEQ ID NO: 6564 - DNA, 25 bp, Zea mays
gggtgatgagaggaattagagcaaa

SEQ ID NO: 6565 - DNA, 25 bp, Zea mays
cttcatggcaacattagctgtgttt

SEQ ID NO: 6566 - DNA, 19 bp, Zea mays
caagatgtttatgaaagcg

SEQ ID NO: 6567 - DNA, 19 bp, Zea mays
caagatgtttatgagagcg

SEQ ID NO: 6568 - DNA, 20 bp, Zea mays
gcctgcccattaggctgaaa
